(19) United States
(12) Patent Application Publication
(10) Pub. No.: US 2002/0022718 A1
(43) Pub. Date: Feb. 21, 2002

(54) Genes identified as required for proliferation of E. coli

(76) Inventors: R. Allyn Forsyth, San Diego, CA (US); Kari L. Ohlsen, San Diego, CA (US); Judith W. Zyskind, La Jolla, CA (US)

Correspondence Address: KNOBBE MARTENS OLSON & BEAR LLP, 620 NEWPORT CENTER DRIVE, SIXTEENTH FLOOR, NEWPORT BEACH, CA, 92660, US

(21) Appl. No.: 09/741,669

(22) Filed: Dec. 19, 2000

Related U.S. Application Data
(60) Provisional application No. 60/173,005, filed on Dec. 23, 1999.

(51) Int. Cl. C07H 21/02; C07H 21/04; C12Q 1/68; C12N 9/00; C12P 21/02; C12N 5/06

(52) U.S. Cl. 536/23.1; 435/6; 435/69.1; 435/183; 435/325

(57) ABSTRACT

The sequences of nucleic acids encoding proteins required for E. coli proliferation are disclosed. The nucleic acids can also be used to screen for homologous genes that are required for proliferation in microorganisms other than E. coli. The nucleic acids can also be used to design expression vectors and secretion vectors. The nucleic acids can be used to express proteins or portions thereof, to obtain antibodies capable of specifically binding to the expressed proteins, and to use those expressed proteins as a screen to isolate candidate molecules for rational drug discovery programs. The nucleic acids of the present invention can also be used in various assay systems to screen for antimicrobial agents.

### RELATED APPLICATIONS

[0001] This application claims priority from U.S. Provisional Patent Application Ser. No. 60/173,005 filed Dec. 23, 1999, the disclosure of which is incorporated herein by reference in its entirety.

### BACKGROUND OF THE INVENTION

[0002] Since the discovery of penicillin, the use of antibiotics to treat the ravages of bacterial infections has saved millions of lives. With the advent of these “miracle drugs,” for a time it was popularly believed that humanity might, once and for all, be saved from the scourge of bacterial infections. In fact, during the 1980s and early 1990s, many large pharmaceutical companies cut back or eliminated antibiotics research and development. They believed that infectious disease caused by bacteria finally had been conquered and that markets for new drugs were limited. Unfortunately, this belief was overly optimistic.

[0003] The tide is beginning to turn in favor of the bacteria as reports of drug resistant bacteria become more frequent. The United States Centers for Disease Control announced that one of the most powerful known antibiotics, vancomycin, was unable to treat an infection of the common Staphylococcus aureus (staph). This organism is commonly found in our environment and is responsible for many nosocomial infections. The import of this announcement becomes clear when one considers that vancomycin was used for years to treat infections caused by stubborn strains of bacteria, like staph. In short, the bacteria are becoming resistant to our most powerful antibiotics. If this trend continues, it is conceivable that we will return to a time when what are presently considered minor bacterial infections are fatal diseases.

[0004] There are a number of causes for the predicament in which practitioners of medical arts find themselves. Over-prescription and improper prescription habits by some physicians have caused an indiscriminate increase in the availability of antibiotics to the public. The patient is also partly responsible, for even in instances where an antibiotic is the appropriate treatment, patients will often improperly use the drug, the result being yet another population of bacteria that is resistant, in whole or in part, to traditional antibiotics.

[0005] The bacterial scourges that have haunted humanity remain, in spite of the development of modem scientific practices to deal with the diseases that they cause. Drug resistant bacteria are now advancing on the health of humanity. A new generation of antibiotics to once again deal with the pending health threat that bacteria present is required.

### Discovery of New Antibiotics

[0006] As more and more bacterial strains become resistant to the panel of available antibiotics, new compounds are required. In the past, practitioners of pharmacology would have to rely upon traditional methods of drug discovery to generate novel, safe and efficacious compounds for the treatment of disease. Traditional drug discovery methods involve blindly testing potential drug candidate-molecules, often selected at random, in the hope that one might prove to be an effective treatment for some disease. The process is painstaking and laborious, with no guarantee of success. Today, the average cost to discover and develop a new drug is nearly US $500 million, and the average time is 15 years from laboratory to patient. Improving this process, even incrementally, would represent a huge advance in the generation of novel antimicrobial agents.

[0007] Newly emerging practices in drug discovery utilize a number of biochemical techniques to provide for directed approaches to creating new drugs, rather than discovering them at random. For example, gene sequences and proteins encoded thereby that are required for the proliferation of an organism make for excellent targets since exposure of bacteria to compounds active against these targets would result in the inactivation of the organism. Once a target is identified, biochemical analysis of that target can be used to discover or to design molecules that interact with and alter the functions of the target. Using physical and computational techniques, to analyze structural and biochemical targets in order to derive compounds that interact with a target is called rational drug design and offers great future potential. Thus, emerging drug discovery practices use molecular modeling techniques, combinatorial chemistry approaches, and other means to produce and screen and/or design large numbers of candidate compounds.

[0008] Nevertheless, while this approach to drug discovery is clearly the way of the future, problems remain. For example, the initial step of identifying molecular targets for investigation can be an extremely time consuming task. It may also be difficult to design molecules that interact with the target by using computer modeling techniques. Furthermore, in cases where the function of the target is not known or is poorly understood, it may be difficult to design assays to detect molecules that interact with and alter the functions of the target. To improve the rate of novel drug discovery and development, methods of identifying important molecular targets in pathogenic microorganisms and methods for identifying molecules that interact with and alter the functions of such molecular targets are urgently required.

[0009] Escherichia coil represents an excellent model system to understand bacterial biochemistry and physiology. The estimated 4288 genes scattered along the 4.6×10⁶ base pairs of the Escherichia coli (E. coli) chromosome offer tremendous promise for the understanding of bacterial biochemical processes. In turn, this knowledge will assist in the development of new tools for the diagnosis and treatment of bacteria-caused human disease. The entire E. coil genome has been sequenced, and this body of information holds a tremendous potential for application to the discovery and development of new antibiotic compounds. Yet, in spite of this accomplishment, the general functions or roles of many of these genes are still unknown. For example, the total number of proliferation-required genes contained within the E. coli genome is unknown, but has been variously estimated at around 200 to 700 (Armstrong, K. A. and Fan, D. P. Essential Genes in the metB-malB Region of Escherichia coli K12, 1975, J. Bacteriol. 126: 48-55).

[0010] Novel, safe and effective antimicrobial compounds are needed in view of the rapid rise of antibiotic resistant microorganisms. However, prior to this invention, the characterization of even a single bacterial gene was a painstaking process, requiring years of effort. Accordingly, there is an urgent need for more novel methods to identify and characterize bacterial genomic sequences that encode gene products required for proliferation and for methods to identify molecules that interact with and alter the functions of such genes and gene products.

### SUMMARY OF THE INVENTION

[0011] One embodiment of the present invention is a purified or isolated nucleic acid sequence consisting essentially of one of the sequence of nucleotides of SEQ ID NOs: 1-93, wherein expression of said nucleic acid in a microorganism is capable of inhibiting the proliferation of a microorganism. The nucleic acid sequence may have as sequence of nucleotides complementary to at least a portion of the nucleotide sequence of the coding strand of a gene whose expression is required for proliferation of a microorganism. The nucleic acid may have a nucleotide sequence complementary to at least a portion of the nucleotide sequence of an RNA required for proliferation of a microorganism. The nucleotide sequence of the RNA may encode more than one gene product.

[0012] Another embodiment of the present invention is a purified or isolated nucleic acid comprising a fragment of one of the nucleotide sequences of SEQ ID NOs.: 1-93, said fragment selected from the group consisting of fragments comprising at least 10, at least 20, at least 25, at least 30, at least 50 and more than 50 consecutive nucleotides of the nucleotide sequence of one of SEQ ID NOs: 1-93.

[0013] Another embodiment of the present invention is a vector comprising a promoter operably linked to the nucleic acid sequences of each of the preceding paragraphs. The promoter may be active in a microorganism selected from the group consisting of Aspergillus fumigatus, Bacillus anthracis, Burkholderia cepacia, Campylobacter jejuni, Candida albicans, Candida glabrata (also called Torulopsis glabrata), Candida tropicalis, Candida parapsilosis, Candida guilliermondii, Candida krusei, Candida kefyr (also called Candida pseudotropicalis), Candida dubliniensis, Chlamydia pneumoniae, Chlamydia trachomatus, Clostridium botulinum, Clostridium difficile, Cryptococcus neoformans, Enterobacter cloacae, Enterococcus faecalis, Escherichia coli, Haemophilus influenzae, Helicobacter pylori, Klebsiella pneumoniae, Listeria monocytogenes, Mycobacterium leprae, Mycobacterium tuberculosis, Neisseria gonorrhoeae, Pseudomonas aeruginosa, Salmonella cholerasuis, Salmonella enterica, Salmonella paratyphi, Salmonella typhi, Salmonella typhimurium, Staphylococcus aureus, Klebsiella pneumoniae, Listeria monocytogenes, Moxarella catarrhalis, Shigella boydii, Shigella dysenteriae, Shigella flexneri, Shigella sonnei, Pseudomonas aeruginosa, Staphylococcus epidermidis, Streptococcus pneumoniae, Treponema pallidum, Yersinia pestis and any species falling within the genera of any of the above species.

[0014] Another embodiment of the present invention is a host cell containing the vectors of the preceding paragraph.

[0015] Another embodiment of the present invention is a purified or isolated nucleic acid consisting essentially of the coding sequence of one of SEQ ID NOs: 106-112, 119-122, 134-160, 164-171, 179-265, 271-273, 275, and 279-286.

[0016] Another embodiment of the present invention is a fragment of the nucleic acid of the preceding paragraph, said fragment comprising at least 10, at least 20, at least 25, at least 30, at least 50 or more than 50 consecutive nucleotides of one of SEQ ID NOs: 106-112, 119-122, 134-160, 164-171, 179-265, 271-273, 275, and 279-286.

[0017] Another embodiment of the present invention is a vector comprising a promoter operably linked to the nucleic acid of the preceding two paragraphs.

[0018] Another embodiment of the present invention is a purified or isolated antisense nucleic acid comprising a nucleic acid sequence complementary to at least a portion of an intragenic sequence, intergenic sequence, sequences spanning at least a portion of two or more genes, 5′ noncoding region, or 3′ noncoding region within an operon comprising a proliferation-required gene whose activity or expression is inhibited by an antisense nucleic acid comprising one of SEQ ID NOs.: 1-93.

[0019] Another embodiment of the present invention is a purified or isolated nucleic acid comprising a nucleic acid having at least 70% identity to a sequence selected from the group consisting of SEQ ID NOs.: 1-93, fragments comprising at least 25 consecutive nucleotides of SEQ ID NOs.: 1-93, the sequences complementary to SEQ ID NOs.: 1-93 and the sequences complementary to fragments comprising at least 25 consecutive nucleotides of SEQ ID NOs.: 1-93 as determined using BLASTN version 2.0 with the default parameters. The nucleic acid may be from an organism selected from the group consisting of Aspergillus fumigatus, Bacillus anthracis, Burkholderia cepacia, Campylobacter jejuni, Candida albicans, Candida glabrata (also called Torulopsis glabrata), Candida tropicalis, Candida parapsilosis, Candida guilliermondii Candida krusei, Candida kefyr (also called Candida pseudotropicalis), Candida dubliniensis, Chlamydia pneumoniae, Chlamydia trachomatus, Clostridium botulinum, Clostridium difficile, Cryptococcus neoformans, Enterobacter cloacae, Enterococcus faecalis, Escherichia coli, Haemophilus influenzae, Helicobacter pylori, Klebsiella pneumoniae, Listeria monocytogenes, Mycobacterium leprae, Mycobacterium tuberculosis, Neisseria gonorrhoeae, Pseudomonas aeruginosa, Salmonella cholerasuis, Salmonella enterica, Salmonella paratyphi, Salmonella typhi, Salmonella typhimurium, Staphylococcus aureus, Klebsiella pneumoniae, Listeria monocytogenes, Moxarella catarrhalis, Shigella boydii, Shigella dysenteriae, Shigella flexneri, Shigella sonnei, Pseudomonas aeruginosa, Staphylococcus epidermidis, Streptococcus pneumoniae, Treponema pallidum, Yersinia pestis and any species falling within the genera of any of the above species.

[0020] Another embodiment of the present invention is a vector comprising a promoter operably linked to a nucleic acid encoding a polypeptide whose expression is inhibited by an antisense nucleic acid comprising one of SEQ ID NOs.: 1-93. The polypeptide may comprise a polypeptide comprising a sequence selected from the group consisting of SEQ ID NOs: 299-305, 312-315, 327-353, 357-364, 372-458, 464-466, 468 and 472-479.

[0021] Another embodiment of the present invention is a host cell containing the vector of the preceding paragraph.

[0022] Another embodiment of the present invention is a purified or isolated polypeptide comprising a polypeptide whose expression is inhibited by an antisense nucleic acid comprising one of SEQ ID NOs.: 1-93, or a fragment selected from the group consisting of fragments comprising at least 5, at least 10, at least 20, at least 30, at least 40, at least 50, at least 60 or more than 60 consecutive amino acids of one of the said polypeptides. The polypeptide may comprise a polypeptide comprising one of SEQ ID NOs.: 299-305, 312-315, 327-353, 357-364, 372-458, 464-466, 468 and 472-479 or a fragment comprising at least 5, at least 10, at least 20, at least 30, at least 40, at least 50, at least 60 or more than 60 consecutive amino acids of a polypeptide comprising a sequence selected from the group consisting of SEQ ID NOs.: 299-305, 312-315, 327-353, 357-364, 372-458, 464-466, 468 and 472-479.

[0023] Another embodiment of the present invention is a purified or isolated polypeptide comprising a polypeptide having at least 25% identity to a polypeptide whose expression is inhibited by a sequence selected from the group consisting of SEQ ID NOs.: 1-93, or at least 25% identity to a fragment comprising at least 5, at least 10, at least 20, at least 30, at least 40, at least 50, at least 60 or more than 60 consecutive amino acids of a polypeptide whose expression is inhibited by a nucleic acid selected from the group consisting of SEQ ID NOs.: 1-93 as determined using FASTA version 3.0t78 with the default parameters. The polypeptide may have at least 25% identity to a polypeptide comprising one of SEQ ID NOs: 299-305, 312-315, 327-353, 357-364, 372-458, 464-466, 468 and 472-479 or at least 25% identity to a fragment comprising at least 5, at least 10, at least 20, at least 30, at least 40, at least 50, at least 60 or more than 60 consecutive amino acids of a polypeptide comprising one of SEQ ID NOs.: 299-305, 312-315, 327-353, 357-364, 372-458, 464-466, 468 and 472-479 as determined using FASTA version 3.0t78 with the default parameters.

[0024] Another embodiment of the present invention is an antibody capable of specifically binding one of the polypeptides of the preceding paragraph.

[0025] Another embodiment of the present invention is a method of producing a polypeptide, comprising introducing a vector comprising a promoter operably linked to a nucleic acid encoding a polypeptide whose expression is inhibited by an antisense nucleic acid comprising one of SEQ ID NOs.: 1-93 into a cell and expressing said polypeptide. The method may further comprise the step of isolating said polypeptide. The polypeptide may comprise a sequence selected from the group consisting of SEQ ID NOs.: 299-305, 312-315, 327-353, 357-364, 372-458, 464-466, 468 and 472-479.

[0026] Another embodiment of the present invention is a method of inhibiting proliferation of a microorganism comprising inhibiting the activity or reducing the amount of a gene product whose expression is inhibited by an antisense nucleic acid comprising a sequence selected from the group consisting of SEQ ID NOs.: 1-93 or inhibiting the activity or reducing the amount of a nucleic acid encoding said gene product. The gene product may comprise a polypeptide comprising a sequence selected from the group consisting of SEQ ID NOs.: 299-305, 312-315, 327-353, 357-364, 372-458, 464-466, 468 and 472-479.

[0027] Another embodiment of the present invention is a method for identifying a compound which influences the activity of a gene product required for proliferation, said gene product comprising a gene product whose expression is inhibited by an antisense nucleic acid comprising a sequence selected from the group consisting of SEQ ID NOs.: 1-93, said method comprising contacting said gene product with a candidate compound and determining whether said compound influences the activity of said gene product. The gene product may be a polypeptide and said activity may be an enzymatic activity. The gene product may be a polypeptide and said activity may be a carbon compound catabolism activity. The gene product may be a polypeptide and said activity may be a biosynthetic activity. The gene product may be a polypeptide and said activity may be a transporter activity. The gene product may be a polypeptide and said activity may be a transcriptional activity. The gene product may be a polypeptide and said activity may be a DNA replication activity. The gene product may be a polypeptide and said activity my be a cell division activity. The gene product may be a polypeptide comprising a sequence selected from the group consisting of SEQ ID NOs.: 299-305, 312-315, 327-353, 357-364, 372-458, 464-466, 468 and 472-479.

[0028] Another embodiment of the present invention is a compound identified using the methods of the preceding paragraph.

[0029] Another embodiment of the present invention is a method for identifying a compound or nucleic acid having the ability to reduce the activity or level of a gene product required for proliferation, said gene product comprising a gene product whose activity or expression is inhibited by an antisense nucleic acid comprising a sequence selected from the group consisting of SEQ ID NOs.: 1-93, said method comprising:

[0030] (a) providing a target that is a gene or RNA, wherein said target comprises a nucleic acid encoding said gene product;

[0031] (b) contacting said target with a candidate compound or nucleic acid; and

[0032] (c) measuring an activity of said target.

[0033] The target may be a messenger RNA molecule and said activity may be translation of said messenger RNA. The target may be a messenger RNA molecule and said activity may be transcription of a gene encoding said messenger RNA. The target may be a gene and said activity may be transcription of said gene. The target may be a nontranslated RNA and said activity may be processing or folding of said nontranslated RNA or assembly of said nontranslated RNA into a protein/RNA complex. The target gene or RNA may encode a polypeptide comprising a sequence selected from the group consisting of SEQ ID NOs.: 299-305, 312-315, 327-353, 357-364, 372-458, 464-466, 468 and 472-479.

[0034] Another embodiment of the present invention is a compound or nucleic acid identified using the methods of the preceding paragraph.

[0035] Another embodiment of the present invention is a method for identifying a compound which reduces the activity or level of a gene product required for proliferation of a microorganism, wherein the activity or expression of said gene product is inhibited by an antisense nucleic acid comprising a sequence selected from the group consisting of SEQ ID NOs.: 1-93, said method comprising the steps of:

[0036] (a) expressing a sub-lethal level of an antisense nucleic acid complementary to a nucleic acid encoding said gene product in a cell to reduce the activity or amount of said gene product in said cell, thereby producing a sensitized cell;

[0037] (b) contacting said sensitized cell with a compound; and

[0038] (c) determining whether said compound inhibits the growth of said sensitized cell.

[0039] The determining step may comprise determining whether said compound inhibits the growth of said sensitized cell to a greater extent than said compound inhibits the growth of a nonsensitized cell. The cell may be selected from the group consisting of bacterial cells, flingal cells, plant cells, and animal cells. The cell may be a Gram negative bacterium. The cell may be an E. coli cell. The cell may be from an organism selected from the group consisting of Aspergillus fumigatus, Bacillus anthracis, Burkholderia cepacia, Campylobacter jejuni, Candida albicans, Candida glabrata (also called Torulopsis glabrata), Candida tropicalis, Candida parapsilosis, Candida guilliermondii, Candida krusei, Candida kefyr (also called Candida pseudotropicalis), Candida dubliniensis, Chlamydia pneumoniae, Chlamydia trachomatus, Clostridium botulinum, Clostridium difficile, Cryptococcus neoformans, Enterobacter cloacae, Enterococcus faecalis, Escherichia coli, Haemophilus influenzae, Helicobacter pylori, Klebsiella pneumoniae, Listeria monocytogenes, Mycobacterium leprae, Mycobacterium tuberculosis, Neisseria gonorrhoeae, Pseudomonas aeruginosa, Salmonella cholerasuis, Salmonella enterica, Salmonella paratyphi, Salmonella typhi, Salmonella typhimurium, Staphylococcus aureus, Klebsiella pneumoniae, Listeria monocytogenes, Moxarella catarrhalis, Shigella boydii, Shigella dysenteriae, Shigella flexneri, Shigella sonnei, Pseudomonas aeruginosa, Staphylococcus epidermidis, Streptococcus pneumoniae, Treponema pallidum, Yersinia pestis and any species falling within the genera of any of the above species. The antisense nucleic acid may be transcribed from an inducible promoter. The method may further comprise the step of contacting said cell with a concentration of inducer which induces said antisense nucleic acid to a sub-lethal level. Growth inhibition may be measured by monitoring optical density of a culture growth solution. The gene product may be a polypeptide. The polypeptide may comprise a sequence selected from the group consisting of SEQ ID NOs.: 299-305, 312-315, 327-353, 357-364, 372-458, 464-466, 468 and 472-479. The gene product may be an RNA.

[0040] Another embodiment of the present invention is a compound identified using the methods of the preceding paragraph.

[0041] Another embodiment of the present invention is a method for inhibiting cellular proliferation comprising introducing a compound with activity against a gene whose activity or expression is inhibited by an antisense nucleic acid comprising a sequence selected from the group consisting of SEQ ID NOs.: 1-93 or a compound with activity against the product of said gene into a population of cells expressing said gene. The compound may be an antisense nucleic acid comprising a sequence selected from the group consisting of SEQ ID NOs.: 1-93, or a proliferation-inhibiting portion thereof. The proliferation inhibiting portion of one of SEQ ID NOs.: 1-93 may be a fragment comprising at least 10, at least 20, at least 25, at least 30, at least 50 or more than 51 consecutive nucleotides of one of SEQ ID NOs.: 1-93. The population may be a population selected from the group consisting of bacterial cells, fungal cells, plant cells, and animal cells. The population may be a population of Gram negative bacteria. The population may be a population of E. coli cells. The population may be a population selected from the group consisting of Aspergillus fumigatus, Bacillus anthracis, Burkholderia cepacia, Campylobacter jejuni, Candida albicans, Candida glabrata (also called Torulopsis glabrata), Candida tropicalis, Candida parapsilosis, Candida guilliermondii, Candida krusei, Candida kefyr (also called Candida pseudotropicalis), Candida dubliniensis, Chlamydia pneumoniae, Chlamydia trachomatus, Clostridium botulinum, Clostridium difficile, Cryptococcus neoformans, Enterobacter cloacae, Enterococcus faecalis, Escherichia coli, Haemophilus influenzae, Helicobacter pylori, Klebsiella pneumoniae, Listeria monocytogenes, Mycobacterium leprae, Mycobacterium tuberculosis, Neisseria gonorrhoeae, Pseudomonas aeruginosa, Salmonella cholerasuis, Salmonella enterica, Salmonella paratyphi, Salmonella typhi, Salmonella typhimurium, Staphylococcus aureus, Klebsiella pneumoniae, Listeria monocytogenes, Moxarella catarrhalis, Shigella boydii, Shigella dysenteriae, Shigella flexneri, Shigella sonnei, Pseudomonas aeruginosa, Staphylococcus epidermidis, Streptococcus pneumoniae, Treponema pallidum, Yersinia pestis and any species falling within the genera of any of the above species. The gene may encode a polypeptide comprising a sequence selected from the group consisting of SEQ ID NOs.: 299-305, 312-315, 327-353, 357-364, 372-458, 464-466, 468 and 472-479.

[0042] Another embodiment of the present invention is a preparation comprising an effective concentration of an antisense nucleic acid comprising a sequence selected from the group consisting of SEQ ID NOs.: 1-93, or a proliferation-inhibiting portion thereof in a pharmaceutically acceptable carrier. The proliferation-inhibiting portion of one of SEQ ID NOs.: 1-93 may comprise at least 10, at least 20, at least 25, at least 30, at least 50 or more than 50 consecutive nucleotides of one of SEQ ID NOs.: 1-93.

[0043] Another embodiment of the present invention is a method for inhibiting the activity or expression of a gene in an operon required for proliferation wherein the activity or expression of at least one gene in said operon is inhibited by an antisense nucleic acid comprising a sequence selected from the group consisting of SEQ ID NOs.: 1-93, said method comprising contacting a cell in a cell population with an antisense nucleic acid comprising at least a proliferation-inhibiting portion of said operon. The antisense nucleic acid comprises a sequence selected from the group consisting of SEQ ID NOs.: 1-93 or a proliferation inhibiting portion thereof. The method of claim 68, wherein said cell is contacted with said antisense nucleic acid by introducing a plasmid which expresses said antisense nucleic acid into said cell population. The cell may be contacted with said antisense nucleic acid by introducing a phage which expresses said antisense nucleic acid into said cell population. The cell may be contacted with said antisense nucleic acid by expressing said antisense nucleic acid from the chromosome of cells in said cell population. The cell may be contacted with said antisense nucleic acid by introducing a promoter adjacent to a chromosomal copy of said antisense nucleic acid such that said promoter directs the synthesis of said antisense nucleic acid. The cell may be contacted with said antisense nucleic acid by introducing a retron which expresses said antisense nucleic acid into said cell population. The cell may be contacted with said antisense nucleic acid by introducing a ribozyme into said cell-population, wherein a binding portion of said ribozyme is complementary to said antisense oligonucleotide. The cell may be contacted with said antisense nucleic acid by introducing a liposome comprising said antisense oligonucleotide into said cell. The cell may be contacted with said antisense nucleic acid by electroporation of said antisense nucleic acid. The antisense nucleic acid may be a fragment comprising at least 10, at least 20, at least 25, at least 30, at least 50 or more than 50 consecutive nucleotides of one of SEQ ID NOs.: 1-93. The antisense nucleic acid may be an oligonucleotide.

[0044] Another embodiment of the present invention is a method for identifying a gene which is required for proliferation of a microorganism comprising:

[0045] (a) contacting a microorganism other than E. coli with a nucleic acid selected from the group consisting of SEQ ID NOs.: 1-93;

[0046] (b) determining whether said nucleic acid inhibits proliferation of said microorganism; and

[0047] (c) identifying the gene in said microorganism which is inhibited by said nucleic acid.

[0048] The microorganism may be a Gram negative bacterium. The microorganism may be selected from the group consisting of Aspergillus fumigatus, Bacillus anthracis, Burkholderia cepacia, Campylobacter jejuni, Candida albicans, Candida glabrata (also called Torulopsis glabrata), Candida tropicalis, Candida parapsilosis, Candida guilliermondii, Candida krusei, Candida kefr (also called Candida pseudotropicalis), Candida dubliniensis, Chlamydia pneumoniae, Chlamydia trachomatus, Clostridium botulinum, Clostridium difficile, Cryptococcus neoformans, Enterobacter cloacae, Enterococcus faecalis, Escherichia coli, Haemophilus influenzae, Helicobacter pylori, Klebsiella pneumoniae, Listeria monocytogenes, Mycobacterium leprae, Mycobacterium tuberculosis, Neisseria gonorrhoeae, Pseudomonas aeruginosa, Salmonella cholerasuis, Salmonella enterica, Salmonella paratyphi, Salmonella typhi, Salmonella typhimurium, Staphylococcus aureus, Klebsiella pneumoniae, Listeria monocytogenes, Moxarella catarrhalis, Shigella boydii, Shigella dysenteriae, Shigella flexneri, Shigella sonnei, Pseudomonas aeruginosa, Staphylococcus epidermidis, Streptococcus pneumoniae, Treponema pallidum, Yersinia pestis and any species falling within the genera of any of the above species. The method may further comprise introducing said nucleic acid into a vector functional in said microorganism prior to introducing said inhibitory nucleic acid into said microorganism.

[0049] Another embodiment of the present invention is a method for identifying a compound having the ability to inhibit proliferation of a microorganism comprising:

[0050] (a) identifying in a first microorganism a homolog of a gene or gene product present in a second microorganism which is different than said first microorganism, wherein the activity or level of said gene or gene product is inhibited by a nucleic acid comprising a sequence selected from the group consisting of SEQ ID NOs. 1-93;

[0051] (b) identifying an inhibitory nucleic acid sequence which inhibits the activity of said homolog in said first microorganism;

[0052] (c) contacting said first microorganism with a sub-lethal level of said inhibitory nucleic acid, thus sensitizing said first microorganism;

[0053] (d) contacting the sensitized microorganism of step (c) with a compound; and

[0054] (e) determining whether said compound inhibits proliferation of said sensitized microorganism.

[0055] The determining step may comprise determining whether said compound inhibits proliferation of said sensitized microorganism to a greater extent than said compound inhibits proliferation of a nonsensitized microorganism. Step (a) may comprise identifying a homologous nucleic acid to a gene or gene product whose activity or level is inhibited by a nucleic acid selected from the group consisting of SEQ ID NOs. 1-93 or a nucleic acid encoding a homologous polypeptide to a polypeptide whose activity or level is inhibited by a nucleic acid selected from the group consisting of SEQ ID NOs. 1-93 by using an algorithm selected from the group consisting of BLASTN version 2.0 with the default parameters and FASTA version 3.0t78 algorithm with the default parameters to identify said homologous nucleic acid or said nucleic acid encoding a homologous polypeptide in a database. Step (a) may comprise identifying a homologous nucleic acid or a nucleic acid encoding a homologous polypeptide by identifying nucleic acids which hybridize to said first gene. Step (a) may comprise expressing a nucleic acid selected from the group consisting of SEQ ID NOs. 1-93 in said microorganism. The inhibitory nucleic acid may be an antisense nucleic acid. The inhibitory nucleic acid may comprise an antisense nucleic acid to a portion of said homolog. The inhibitory nucleic acid may comprise an antisense nucleic acid to a portion of the operon encoding said homolog. The step of contacting the first microorganism with a sub-lethal level of said inhibitory nucleic acid may comprise directly contacting said microorganism with said inhibitory nucleic acid. The step of contacting the first microorganism with a sub-lethal level of said inhibitory nucleic acid may comprise expressing an antisense nucleic acid to said homolog in said microorganism. The gene product may comprise a polypeptide comprising a sequence selected from the group consisting of SEQ ID NOs.: 299-305, 312-315, 327-353, 357-364, 372-458, 464-466, 468 and 472-479.

[0056] Another embodiment of the present invention is a compound identified using the method of the preceding paragraph.

[0057] Another embodiment of the present invention is a method of identifying a compound having the ability to inhibit proliferation comprising:

[0058] (a) contacting a microorganism other than E. coli with a sub-lethal level of a nucleic acid comprising a sequence selected from the group consisting of SEQ ID NOs. 1-93 or a portion thereof which inhibits the proliferation of E. coli, thus sensitizing said microorganism;

[0059] (b) contacting the sensitized microorganism of step (a) with a compound; and

[0060] (c) determining whether said compound inhibits proliferation of said sensitized microorganism.

[0061] The determining step may comprise determining whether said compound inhibits proliferation of said sensitized microorganism to a greater extent than said compound inhibits proliferation of a nonsensitized microorganism.

[0062] Another embodiment of the present invention is a compound identified using the methods of the preceding paragraph.

[0063] Another embodiment of the present invention is a method for identifying a compound having activity against a biological pathway required for proliferation comprising:

[0064] (a) sensitizing a cell by expressing a sub-lethal level of an antisense nucleic acid complementary to a nucleic acid encoding a gene product required for proliferation, wherein the activity or expression of said gene product is inhibited by an antisense nucleic acid comprising a sequence selected from the group consisting of SEQ ID NOs.: 1-93, in said cell to reduce the activity or amount of said gene product;

[0065] (b) contacting the sensitized cell with a compound; and

[0066] (c) determining whether said compound inhibits the growth of said sensitized cell.

[0067] The determining step may comprise determining whether said compound inhibits the growth of said sensitized cell to a greater extent than said compound inhibits the growth of a nonsensitized cell. The cell may be selected from the group consisting of bacterial cells, fungal cells, plant cells, and animal cells. The cell may be a Gram negative bacterium. The Gram negative bacterium may be E. coli. The cell may be selected from the group consisting of Aspergillus fumigatus, Bacillus anthracis, Burkholderia cepacia, Campylobacter jejuni, Candida albicans, Candida glabrata (also called Torulopsis glabrata), Candida tropicalis, Candida parapsilosis, Candida guilliermondii, Candida krusei, Candida kefyr (also called Candida pseudotropicalis), Candida dubliniensis, Chlamydia pneumoniae, Chlamydia trachomatus, Clostridium botulinum, Clostridium difficile, Cryptococcus neoformans, Enterobacter cloacae, Enterococcus faecalis, Escherichia coli, Haemophilus influenzae, Helicobacter pylori, Klebsiella pneumoniae, Listeria monocytogenes, Mycobacterium leprae, Mycobacterium tuberculosis, Neisseria gonorrhoeae, Pseudomonas aeruginosa, Salmonella cholerasuis, Salmonella enterica, Salmonella paratyphi, Salmonella typhi, Salmonella typhimurium, Staphylococcus aureus, Klebsiella pneumoniae, Listeria monocytogenes, Moxarella catarrhalis, Shigella boydii, Shigella dysenteriae, Shigella flexneri, Shigella sonnei, Pseudomonas aeruginosa, Staphylococcus epidermidis, Streptococcus pneumoniae, Treponema pallidum, Yersinia pestis and any species falling within the genera of any of the above species. The antisense nucleic acid may be transcribed from an inducible promoter. The method may further comprise contacting the cell with an agent which induces expression of said antisense nucleic acid from said inducible promoter, wherein said antisense nucleic acid is expressed at a sub-lethal level. The inhibition of proliferation may be measured by monitoring the optical density of a liquid culture. The gene product may comprise a polypeptide comprising a sequence selected from the group consisting of SEQ ID NOs.: 299-305, 312-315, 327-353, 357-364, 372-458, 464-466, 468 and 472-479.

[0068] Another embodiment of the present invention is a compound identified using the methods of the preceding paragraph.

[0069] Another embodiment of the present invention is a method for identifying a compound having the ability to inhibit cellular proliferation comprising:

[0070] (a) contacting a cell with an agent which reduces the activity or level of a gene product required for proliferation of said cell, wherein said gene product is a gene product whose activity or expression is inhibited by an antisense nucleic acid comprising a sequence selected from the group consisting of SEQ ID NOs.: 1-93;

[0071] (b) contacting said cell with a compound; and

[0072] (c) determining whether said compound reduces proliferation of said contacted cell.

[0073] The determining step may comprise determining whether said compound reduces proliferation of said contacted cell to a greater extent than said compound reduces proliferation of cells which have not been contacted with said agent. The agent which reduces the activity or level of a gene product required for proliferation of said cell may comprise an antisense nucleic acid to a gene or operon required for proliferation. The agent which reduces the activity or level of a gene product required for proliferation of said cell may comprise a compound known to inhibit growth or proliferation of a microorganism. The cell may contain a mutation which reduces the activity or level of said gene product required for proliferation of said cell. The mutation may be a temperature sensitive mutation. The gene product may comprise a polypeptide comprising a sequence selected from the group consisting of SEQ ID NOs.: 299-305, 312-315, 327-353, 357-364, 372-458, 464-466, 468 and 472-479.

[0074] Another embodiment of the present invention is a compound identified using the method of the preceding paragraph.

[0075] Another embodiment of the present invention is a method for identifying the biological pathway in which a proliferation-required gene or its gene product lies, wherein said gene or gene product comprises a gene or gene product whose activity or expression is inhibited by an antisense nucleic acid comprising a sequence selected from the group consisting of SEQ ID NOs.: 1-93, said method comprising:

[0076] (a) expressing a sub-lethal level of an antisense nucleic acid which inhibits the activity of said proliferation-required gene or gene product in a cell;

[0077] (b) contacting said cell with a compound known to inhibit growth or proliferation of a microorganism, wherein the biological pathway on which said compound acts is known; and

[0078] (c) determining whether said cell is sensitive to said compound.

[0079] The determining step may comprise determining whether said cell has a substantially greater sensitivity to said compound than a cell which does not express said sub-lethal level of said antisense nucleic acid and wherein said gene or gene product lies in the same pathway on which said compound acts if said cell expressing said sub-lethal level of said antisense nucleic acid has a substantially greater sensitivity to said compound than said cell which does not express said sub-lethal level of said antisense nucleic acid. The gene product may comprise a polypeptide comprising a sequence selected from the group consisting of SEQ ID NOs.: 299-305, 312-315, 327-353, 357-364, 372-458, 464-466, 468 and 472-479.

[0080] Another embodiment of the present invention is a method for determining the biological pathway on which a test compound acts comprising:

[0081] (a) expressing a sub-lethal level of an antisense nucleic acid complementary to a proliferation-required nucleic acid in a cell, wherein the activity or expression of said proliferation-required nucleic acid is inhibited by an antisense nucleic acid comprising a sequence selected from the group consisting of SEQ ID NOs.: 1-93 and wherein the biological pathway in which said proliferation-required nucleic acid or a protein encoded by said proliferation-required polypeptide lies is known,

[0082] (b) contacting said cell with said test compound; and

[0083] (c) determining whether said cell is sensitive to said test compound. The determining step may comprise determining whether said cell has a substantially greater sensitivity to said test compound than a cell which does not express said sub-lethal level of said antisense nucleic acid. The method may further comprise:

[0084] (d) expressing a sub-lethal level of a second antisense nucleic acid complementary to a second proliferation-required nucleic acid in a second cell, wherein said second proliferation-required nucleic acid is in a different biological pathway than said proliferation-required nucleic acid in step (a); and

[0085] (e) determining whether said second cell does not have a substantially greater sensitivity to said test compound than a cell which does not express said sub-lethal level of said second antisense nucleic acid, wherein said test compound is specific for the biological pathway against which the antisense nucleic acid of step (a) acts if said second cell does not have substantially greater sensitivity to said test compound.

[0086] Another embodiment of the present invention is a purified or isolated nucleic acid comprising a sequence selected from the group consisting of SEQ ID NOs.: 1-93.

[0087] Another embodiment of the present invention is a compound which interacts with a gene or gene product whose activity or expression is inhibited by an antisense nucleic acid comprising one of SEQ ID NOs.: 1-93 to inhibit proliferation.

[0088] Another embodiment of the present invention is a compound which interacts with a polypeptide whose expression is inhibited by an antisense nucleic acid comprising one of SEQ ID NOs.: 1-93 to inhibit proliferation.

[0089] Another embodiment of the present invention is a method for manufacturing an antibiotic comprising the steps of screening one or more candidate compounds to identify a compound that reduces the activity or level of a gene product required for proliferation, said gene product comprising a gene product whose activity or expression is inhibited by an antisense nucleic acid comprising a sequence selected from the group consisting of SEQ ID NOs.: 1-93 and manufacturing the compound so identified. The screening step may comprise performing any one of the methods of identifying a compound described above.

[0090] Another embodiment of the present invention is a method for inhibiting proliferation of a microorganism in a subject comprising administering a compound that reduces the activity or level of a gene product required for proliferation of said microorganism, said gene product comprising a gene product whose activity or expression is inhibited by an antisense nucleic acid comprising a sequence selected from the group consisting of SEQ ID NOs.: 1-93 to said subject. The method of subject may be selected from the group consisting of vertebrates, mammals, avians, and human beings. The gene product may comprise a polypeptide comprising a sequence selected from the group consisting of SEQ ID NOs.: 299-305, 312-315, 327-353, 357-364,372-458, 464-466, 468 and 472-479.

### BRIEF DESCRIPTION OF THE DRAWINGS

[0091] FIG. 1 is an IPTG dose response curve in E. coli transformed with an IPTG-inducible plasmid containing either an antisense clone to the E. coli rplW gene (AS-rplW) which encodes a ribosomal protein required for protein synthesis and essential for cell proliferation, or an antisense clone to the elaD gene (AS-elaD) which is not known to be involved in protein synthesis and which is also essential for proliferation.

[0092] FIG. 2A is a tetracycline dose response curve in E. coli transformed with an IPTG-inducible plasmid containing antisense to the rplW gene (AS-rplW) which was carried out in the presence of 0, 20 or 50 μM IPTG.

[0093] FIG. 2B is a tetracycline dose response curve in E. coli transformed with an IPTG-inducible plasmid containing antisense to the elaD gene (AS-elaD) which was carried out in the presence of 0, 20 or 50 μM IPTG.

[0094] FIG. 3 is a graph showing the fold increase in tetracycline sensitivity of E. coli transfected with antisense clones to essential ribosomal protein genes L23 (AS-rplW) and L7/L12 and L10 (AS-rplLrplJ). Antisense clones to genes known not to be involved in protein synthesis (atpB/E(AS-atpB/E), visC (AS-visC), elaD (AS-elaD), yohH (AS-yohH) are much less sensitive to tetracycline.

### DEFINITIONS

[0095] By “biological pathway” is meant any discrete cell function or process that is carried out by a gene product or a subset of gene products. Biological pathways include enzymatic, biochemical and metabolic pathways as well as pathways involved in the production of cellular structures such as cell walls. Biological pathways that are usually required for proliferation of microorganisms include, but are not limited to, cell division, DNA synthesis and replication, RNA synthesis (transcription), protein synthesis (translation), protein processing, protein transport, fatty acid biosynthesis, cell wall synthesis, cell membrane production, synthesis and maintenance, and the like.

[0096] By “inhibit activity of a gene or gene product” is meant having the ability to interfere with the function of a gene or gene product in such a way as to decrease expression of the gene or to reduce the level or activity of a product of the gene. Agents which inhibit the activity of a gene include agents that inhibit transcription of the gene, agents that inhibit processing of the transcript of the gene, agents that reduce the stability of the transcript of the gene, and agents that inhibit translation of the mRNA transcribed from the gene. In microorganisms, agents which inhibit the activity of a gene can act to decrease expression of the operon in which the gene resides or alter the folding or processing of operon RNA so as to reduce the level or activity of the gene product. The gene product can be a non-translated RNA such as ribosomal RNA, a translated RNA (MRNA) or the protein product resulting from translation of the gene mRNA. Of particular utility to the present invention are antisense RNAs that have activities against the operons or genes to which they specifically hybridze.

[0097] By “activity against a gene product” is meant having the ability to inhibit the function or to reduce the level or activity of the gene product in a cell.

[0098] By “activity against a protein” is meant having the ability to inhibit the function or to reduce the level or activity of the protein in a cell.

[0099] By “activity against a nucleic acid” is meant having the ability to inhibit the function or to reduce the level or activity of the nucleic acid in a cell.

[0100] By “activity against a gene” is meant having the ability to inhibit the function or expression of the gene in a cell.

[0101] By “activity against an operon” is meant having the ability to inhibit the function or reduce the level of one or more products of the operon in a cell.

[0102] By “antibiotic” is meant an agent which inhibits the proliferation of a microorganism.

[0103] By “E. coli or Escherichia coli” is meant Escherichia coli or any organism previously categorized as a species of Shigella including Shigella boydii, Shigella flexneri, Shigella dysenteriae, Shigella sonnei, Shigella 2A.

[0104] By “identifying a compound” is meant to screen one or more compounds in a collection of compounds such as a combinatorial chemical library or other library of chemical compounds or to characterize a single compound by testing the compound in a given assay and determining whether it exhibits the desired activity.

[0105] By “inducer” is meant an agent or solution which, when placed in contact with a microorganism, increases transcription from a desired promoter.

[0106] As used herein, “nucleic acid” means DNA, RNA, or modified nucleic acids. Thus, the terminology “the nucleic acid of SEQ ID NO: X” includes both the DNA sequence of SEQ ID NO: X and an RNA sequence in which the thymidines in the DNA sequence have been substituted with uridines in the RNA sequence and in which the deoxyribose backbone of the DNA sequence has been substituted with a ribose backbone in the RNA sequence. Modified nucleic acids are nucleic acids having nucleotides or structures which do not occur in nature, such as nucleic acids in which the intemucleotide phosphate residues with methylphosphonates, phosphorothioates, phosphoramidates, and phosphate esters. Nonphosphate intemucleotide analogs such as siloxane bridges, carbonate brides, thioester bridges, as well as many others known in the art may also be used in modified nucleic acids. Modified nucleic acids may also comprise, a-anomeric nucleotide units and modified nucleotides such as 1,2-dideoxy-d-ribofuranose, 1,2-dideoxy-l-phenylribofuranose, and N⁴,N⁴-ethano-5-methyl-cytosine are contemplated for use in the present invention. Modified nucleic acids may also be peptide nucleic acids in which the entire deoxyribose-phosphate backbone has been exchanged with a chemically completely different, but structurally homologous, polyamide (peptide) backbone containing 2-aminoethyl glycine units.

[0107] As used herein, “sub-lethal” means a concentration of an agent below the concentration required to inhibit all cell growth.

### DETAILED DESCRIPTION OF THE INVENTION

[0108] The present invention describes a group of E. coli genes and gene families required for growth and/or proliferation. A proliferation-required gene or gene family is one where, in the absence of a gene transcript and/or gene product, growth or viability of the microorganism is reduced or eliminated. Thus, as used herein the terminology “proliferation-required” or “required for proliferation” encompasses instances where the absence of a gene transcript and/or gene product completely eliminates cell growth as well as instances where the absence of a gene transcript and/or gene product merely reduces cell growth. These proliferation-required genes can be used as potential targets for the generation of new antimicrobial agents. To achieve that goal, the present invention also encompasses novel assays for analyzing proliferation-required genes and for identifying compounds which interact with the gene products of the proliferation-required genes. In addition, the present invention contemplates the expression of genes and the purification of the proteins encoded by the nucleic acid sequences identified as required proliferation genes and reported herein. The purified proteins can be used to generate reagents and screen small molecule libraries or other candidate compound libraries for compounds that can be further developed to yield novel antimicrobial compounds. The present invention also describes methods for identification of homologous genes or polypeptides in organisms other than E. coli.

[0109] The present invention utilizes a novel method to identify proliferation-required E. coli sequences. Generally, a library of nucleic acid sequences from a given source are subcloned or otherwise inserted into an inducible expression vector, thus forming an expression library. Although the insert nucleic acids may be derived from the chromosome of the organism into which the expression vector is to be introduced, because the insert is not in its natural chromosomal location, the insert nucleic acid is an exogenous nucleic acid for the purposes of the discussion herein. The term expression is defined as the production of an RNA molecule from a gene, gene fragment, genomic fragment, or operon. Expression can also be used to refer to the process of peptide or polypeptide synthesis. An expression vector is defined as a vehicle by which a ribonucleic acid (RNA) sequence is transcribed from a nucleic acid sequence carried within the expression vehicle. The expression vector can also contain features that permit translation of a protein product from the transcribed RNA message expressed from the exogenous nucleic acid sequence carried by the expression vector. Accordingly, an expression vector can produce an RNA molecule as its sole product or the expression vector can produce a RNA molecule that is ultimately translated into a protein product.

[0110] Once generated, the expression library containing the exogenous nucleic acid sequences is introduced into an E. coli population to search for genes that are required for bacterial proliferation. Because the library molecules are foreign to the population of E. coli, the expression vectors and the nucleic acid segments contained therein are considered exogenous nucleic acid.

[0111] Expression of the exogenous nucleic acid fragments in the test population of E. coli containing the expression vector library is then activated. Activation of the expression vectors consists of subjecting the cells containing the vectors to conditions that result in the expression of the exogenous nucleic acid sequences carried by the expression vector library. The test population of E. coli cells is then assayed to determine the effect of expressing the exogenous nucleic acid fragments on the test population of cells. Those expression vectors that, upon activation and expression, negatively impact the growth of the E. coli screen population are identified, isolated, and purified for further study.

[0112] A variety of assays are contemplated to identify nucleic acid sequences that negatively impact growth upon expression. In one embodiment, growth in E. coli cultures expressing exogenous nucleic acid sequences is compared to growth in cultures not expressing these sequences. Optical density is used to monitor the extent of growth. Alternatively, enzymatic assays can be used to determine bacterial growth rates to identify exogenous nucleic acid sequences of interest. Colony size, colony morphology, and cell morphology are additional factors used to evaluate growth of the host cells. Those cultures that fail to grow or grow at a reduced rate under expression conditions are identified as containing an expression vector encoding a nucleic acid fragment that negatively affects a proliferation-required gene.

[0113] Once exogenous nucleic acid sequences of interest are identified, they are analyzed. The first step of the analysis is to acquire the nucleic acid sequence of the nucleic acid fragment of interest. To achieve this end, the insert in those expression vectors identified as containing a sequence of interest is sequenced, using standard techniques well known in the art. The next step of the process is to determine the source of the nucleic acid sequence.

[0114] Determination of sequence source is achieved by comparing the obtained sequence data with known sequences in various genetic databases. The sequences identified are used to probe these gene databases. The result of this procedure is a list of exogenous nucleic acid sequences corresponding to a list that includes novel bacterial genes required for proliferation as well as genes previously identified as required for proliferation.

[0115] The number of DNA and protein sequences available in database systems has been growing exponentially for years. For example, at the end of 1998, the complete sequences of Caenorhabditis elegans, Saccharomyces cerevisiae and nineteen bacterial genomes, including E. coli were available. This sequence information is stored in a number of databanks, such as GenBank (the National Center for Biotechnology Information (NCBI), and is publicly available for searching.

[0116] A variety of computer programs are available to assist in the analysis of the sequences stored within these databases. FASTA, (W. R. Pearson (1990) “Rapid and Sensitive Sequence Comparison with FASTP and FASTA” Methods in Enzymology 183:63-98), Sequence Retrieval System (SRS), (Etzold & Argos, SRS an indexing and retrieval tool for flat file data libraries. Comput. Appl. Biosci. 9:49-57, 1993) are two examples of computer programs that can be used to analyze sequences of interest. In one embodiment of the present invention, the BLAST family of computer programs, which includes BLASTN version 2.0 with the default parameters, or BLASTX version 2.0 with the default parameters, is used to analyze nucleic acid sequences.

[0117] BLAST, an acronym for “Basic Local Alignment Search Tool,” is a family of programs for database similarity searching. The BLAST family of programs includes: BLASTN, a nucleotide sequence database searching program, BLASTX, a protein database searching program where the input is a nucleic acid sequence; and BLASTP, a protein database searching program where the input is an amino acid sequence. BLAST programs embody a fast algorithm for sequence matching, rigorous statistical methods for judging the significance of matches, and various options for tailoring the program for special situations. Assistance in using the program can be obtained by e-mail at blast@ncbi.nlm.nih.gov.

[0118] Bacterial genes are often transcribed in polycistronic groups. These groups comprise operons, which are a collection of genes and intergenic sequences. The genes of an operon are co-transcribed and often have related finctions. Given the nature of the screening protocol, it is possible that the identified exogenous nucleic acid sequence corresponds to a gene or portion thereof with or without adjacent noncoding sequences, an intragenic sequence (i.e. a sequence within a gene), an intergenic sequence (i.e. a sequence between genes), a sequence spanning at least a portion of two or more genes, a 5′ noncoding region or a 3′ noncoding region located upstream or downstream from the actual sequence that is required for bacterial proliferation. Accordingly, determining which gene(s) that is encoded within the operons is individually required for proliferation is often desirable.

[0119] In one embodiment of the present invention, an operon is dissected to determine which gene or genes are required for proliferation. For example, the RegulonDB DataBase described by Huerta et al. (Nucl. Acids Res. 26:55-59, 1998), which may also be found on the website http://www.cifn.unam.mx/Computational_Biology/regulondb/, may be used to identify the boundaries of operons encoded within microbial genomes. A number of techniques that are well known in the art can then be used to dissect the operon. In one aspect of this embodiment, gene disruption by homologous recombination is used to individually inactivate the genes of an operon that is thought to contain a gene required for proliferation.

[0120] Several gene disruption techniques have been described for the replacement of a functional gene with a mutated, non-functional (null) allele. These techniques generally involve the use of homologous recombination. The method described by Link et al. (J. Bacteriol 1997 179:6228; incorporated herein by reference in it's entirety) serves as an excellent example of these methods as applicable to disruption of genes in E. coli. This technique uses crossover PCR to create a null allele with an in-frame deletion of the coding region of a target gene. The null allele is constructed in such a way that sequences adjacent to the wild type gene (ca. 500 bp) are retained. These homologous sequences surrounding the deletion null allele provide targets for homologous recombination so that the wild type gene on the E. coli chromosome can be replaced by the constructed null allele.

[0121] The crossover PCR amplification product is subcloned into the vector pKO3, the features of which include a chloramphenicol resistance gene, the counter-selectable marker sacB, and a temperature sensitive autonomous replication function. Following transformation of an E. coli cell population with such a vector, selection for cells that have undergone homologous recombination of the vector into the chromosome is achieved by growth on chloramphenicol at the non-permissive temperature of 43° C. Under these conditions, autonomous replication of the plasmid cannot occur and cells are resistant to chloramphinicol only if the chloramphenicol resistance gene has been integrated into the chromosome. Usually a single crossover event is responsible for this integration event such that the E. coli chromosome now contains a tandem duplication of the target gene consisting of one wild type allele and one deletion null allele separated by vector sequence.

[0122] This new E. coli strain containing the tandem duplication can be maintained at permissive temperatures in the presence of drug selection (chloramphenicol). Subsequently, cells of this new strain are cultured at the permissive temperature 30° C. without drug selection. Under these conditions, the chromosome of some of the cells within the population will have undergone an internal homologous recombination event resulting in removal of the plasmid sequences. Subsequent culturing of the strain in growth medium lacking chloramphenicol but containing sucrose is used to select for such recombinative resolutions. In the presence of the counter-selectable marker sacB, sucrose is rendered into a toxic metabolite. Thus, cells that survive this counter-selection have lost both the plasmid sequences from the chromosome and the autonomously replicating plasmid that results as a byproduct of recombinative resolution.

[0123] There are two possible outcomes of the above recombinative resolution via homologous recombination. Either the wild type copy of the targeted gene is retained on the chromosome or the mutated null allele is retained on the chromosome. In the case of an essential gene, a single copy of the null allele would be lethal and such cells should not be obtained by the above procedure when applied to essential genes. In the case of a non-essential gene, roughly equal numbers of cells containing null alleles and cells containing wild type alleles should be obtained. Thus, the method serves as a test for essentiality of the targeted gene: when applied to essential genes, only cells with a wild type allele on the chromosome will be obtained.

[0124] Other techniques have also been described for the creation of disruption mutations in E. coli. For example, Link et al. also describe inserting an in-frame sequence tag concommitantly with an in-frame deletion in order to simplify analysis of recombinants obtained. Further, Link et al. describe disruption of genes with a drug resistance marker such as a kanamycin resistance gene. Arigoni et al., (Arigoni, F. et al. A Genome-based Approach for the Identification of Essential Bacterial Genes, Nature Biotechnology 16: 851-856, the disclosure of which is incorporated herein by reference in its entirety) describe the use of gene disruption combined with engineering a second copy of a test gene such that the expression of the gene is regulated by and inducible promoter such as the arabinose promoter to test the essentiality of the gene. Many of these techniques result in the insertion of large fragments of DNA into the gene of interest, such as a drug selection marker. An advantage of the technique described by Link et al. is that it does not rely on an insertion into the gene to cause a functional defect, but rather results in the precise removal of the coding region. This insures the lack of polar effects on the expression of genes downstream from the target gene.

[0125] Recombinant DNA techniques can be used to express the entire coding sequences of the gene identified as required for proliferation, or portions thereof. The over-expressed proteins can be used as reagents for further study. The identified exogenous sequences are isolated, purified, and cloned into a suitable expression vector using methods well known in the art. If desired, the nucleic acids can contain the sequences encoding a signal peptide to facilitate secretion of the expressed protein.

[0126] Expression of fragments of the bacterial genes identified as required for proliferation is also contemplated by the present invention. The fragments of the identified genes can encode a polypeptide comprising at least 5, at least 10, at least 15, at least 20, at least 25, at least 30, at least 35, at least 40, at least 45, at least 50, at least 55, at least 60, at least 65, at least 75, or more than 75 consecutive amino acids of a gene complementary to one of the identified sequences of the present invention. The nucleic acids inserted into the expression vectors can also contain sequences upstream and downstream of the coding sequence.

[0127] When expressing the coding sequence of an entire gene identified as required for bacterial proliferation or a fragment thereof, the nucleic acid sequence to be expressed is operably linked to a promoter in an expression vector using conventional cloning technology. The expression vector can be any of the bacterial, insect, yeast, or mammalian expression systems known in the art. Commercially available vectors and expression systems are available from a variety of suppliers including Genetics Institute (Cambridge, Mass.), Stratagene (La Jolla, Calif.), Promega (Madison, Wis.), and Invitrogen (San Diego, Calif.). If desired, to enhance expression and facilitate proper protein folding, the codon usage and codon bias of the sequence can be optimized for the particular expression organism in which the expression vector is introduced, as explained by Hatfield, et al., U.S. Pat. No. 5,082,767, incorporated herein by this reference. Fusion protein expression systems are also contemplated by the present invention.

[0128] Following expression of the protein encoded by the identified exogenous nucleic acid sequence, the protein is purified. Protein purification techniques are well known in the art. Proteins encoded and expressed from identified exogenous nucleic acid sequences can be partially purified using precipitation techniques, such as precipitation with polyethylene glycol. Alternatively, epitope tagging of the protein can be used to allow simple one step purification of the protein. Chromatographic methods usable with the present invention can include ion-exchange chromatography, gel filtration, use of hydroxyapaptite columns, immobilized reactive dyes, chromatofocusing, and use of high-performance liquid chromatography. Electrophoretic methods such one-dimensional gel electrophoresis, high-resolution two-dimensional polyacrylamide electrophoresis, isoelectric focusing, and others are contemplated as purification methods. Also, affinity chromatographic methods, comprising antibody columns, ligand presenting columns and other affinity chromatographic matrices are contemplated as purification methods in the present invention.

[0129] The purified proteins produced from the gene coding sequences identified as required for proliferation can be used in a variety of protocols to generate useful antimicrobial reagents. In one embodiment of the present invention, antibodies are generated against the proteins expressed from the identified exogenous nucleic acid sequences. Both monoclonal and polyclonal antibodies can be generated against the expressed proteins. Methods for generating monoclonal and polyclonal antibodies are well known in the art. Also, antibody fragment preparations prepared from the produced antibodies discussed above are contemplated.

[0130] In addition, the purified protein, fragments therof, or derivatives thereof may be administered to an individual in a pharmaceutically acceptable carrier to induce an immune response against the protein. Preferably, the immune response is a protective immune response which protects the individual. Methods for determining appropriate dosages of the protein and pharmaceutically acceptable carriers are familiar to those skilled in the art.

[0131] Another application for the purified proteins of the present invention is to screen small molecule libraries for candidate compounds active against the various target proteins of the present invention. Advances in the field of combinatorial chemistry provide methods, well known in the art, to produce large numbers of candidate compounds that can have a binding, or otherwise inhibitory effect on a target protein. Accordingly, the screening of small molecule libraries for compounds with binding affinity or inhibitory activity for a target protein produced from an identified gene sequence is contemplated by the present invention.

[0132] The present invention further contemplates utility against a variety of other pathogenic organisms in addition to E. coli. For example, the invention has utility in identifying genes required for proliferation in prokaryotes and eukaryotes. For example, the invention has utility with protists, such as Plasmodium spp .and as Entamoeba spp.; plants; animals, such and Contracaecum spp; and fungi including Candida spp., ((e.g., Candida albicans Candida glabrata (also called Torulopsis glabrata), Candida tropicalis, Candida parapsilosis, Candida guilliermondii, Candida krusei, Candida kefyr (also called Candida pseudotropicalis), Candida dubliniensis,)), Saccharomyces cerevisiae, Cryptococcus neoformans, and Aspergillus fumigatus. In one embodiment of the present invention, monera, specifically bacteria are probed in search of novel gene sequences required for proliferation. This embodiment is particularly important given the rise of drug resistant bacteria.

[0133] The numbers of bacterial species that are becoming resistant to existing antibiotics are growing. A partial list of these organisms includes: Staphylococcus spp., such as S. aureus; Enterococcus spp., such as E. faecalis; Pseudomonas spp., such as P. aeruginosa, Clostridium spp., such as C. botulinum or C. difficile, Haemophilus spp., such as H. influenzae, Enterobacter spp., such as E. cloacae, Vibrio spp., such as V. cholera; Moraxala spp., such as M. catarrhalis; Streptococcus spp., such as S. pneumoniae, Neisseria spp., such as N. gonorrhoeae; Mycoplasma spp., such as Mycoplasma pneumoniae; Salmonella typhimurium; Helicobacter pylon; Escherichia coli; and Mycobacterium tuberculosis. The sequences identified as required for proliferation in the present invention can be used to probe these and other organisms to identify homologous required proliferation genes contained therein.

[0134] In one embodiment of the present invention, the nucleic acid sequences disclosed herein are used to screen genomic libraries generated from bacterial species of interest other than E. coli. For example, the genomic library may be from Aspergillus fumigatus, Bacillus anthracis, Burkholderia cepacia, Campylobacter jejuni, Candida albicans, Candida glabrata (also called Torulopsis glabrata), Candida tropicalis, Candida parapsilosis, Candida guilliermondii, Candida krusei, Candida kefyr (also called Candida pseudotropicalis), Candida dubliniensis, Chlamydia pneumoniae, Chlamydia trachomatus, Clostridium botulinum, Cryptococcus neoformans, Enterobacter cloacae, Enterococcus faecalis, Haemophilus influenzae, Helicobacter pylon, Klebsiella pneumoniae, Listeria monocytogenes, Mycobacterium leprae, Mycobacterium tuberculosis, Neisseria gonorrhoeae, Pseudomonas aeruginosa, Salmonella cholerasuis, Salmonella enterica, Salmonella paratyphi, Salmonella typhi, Salmonella typhimurium, Staphylococcus aureus, Klebsiella pneumoniae, Listeria monocytogenes, Moxarella catarrhalis, Shigella boydii, Shigella dysenteriae, Shigella flexneri, Shigella sonnet, Pseudomonas aeruginosa, Staphylococcus epidermidis, Streptococcus pneumoniae, Treponema pallidum, Yersinia pestis or any species falling within the genera of any of the above species. Standard molecular biology techniques are used to generate genomic libraries from various microorganisms. In one aspect, the libraries are generated and bound to nitrocellulose paper. The identified exogenous nucleic acid sequences of the present invention can then be used as probes to screen the libraries for homologous sequences. The homologous sequences identified can then be used as targets for the identification of new, antimicrobial compounds with activity against more than one organism.

[0135] For example, the preceding methods may be used to isolate nucleic acids having a sequence with at least 97%, at least 95%, at least 90%, at least 85%, at least 80%, or at least 70% identity to a nucleic acid sequence selected from the group consisting of one of the sequences of SEQ ID NOS. 1-93, 106-112,119-122, 134-160, 164-171, 179-265, 271-273, 275, and 279-286, fragments comprising at least 10, 15, 20, 25, 30, 35, 40, 50, 75, 100, 150, 200, 300, 400, or 500 consecutive nucleotides thereof, and the sequences complementary thereto. Identity may be measured using BLASTN version 2.0 with the default parameters. (Altschul, S.F. et al. Gapped BLAST and PSI-BLAST: A New Generation of Protein Database Search Programs, Nucleic Acid Res. 25: 3389-3402 (1997), the disclosure of which is incorporated herein by reference in its entirety). For example, the homologous polynucleotides may have a coding sequence which is a naturally occurring allelic variant of one of the coding sequences described herein. Such allelic variants may have a substitution, deletion or addition of one or more nucleotides when compared to the nucleic acids of SEQ ID NOs: 1-93, 106-112, 119-122, 134-160, 164-171, 179-265, 271-273, 275, and 279-286 or the sequences complementary thereto.

[0136] Additionally, the above procedures may be used to isolate nucleic acids which encode polypeptides having at least 99%, 95%, at least 90%, at least 85%, at least 80%, at least 70%, at least 60%, at least 50%, or at least 40% identity or similarity to a polypeptide having the sequence of one of SEQ ID NOs: 299-305, 312-315, 327-353, 357-364, 372-458, 464-466, 468 and 472-479 or to a polypeptide whose expression is inhibited by a nucleic acid of one of SEQ ID NOs.: 1-93, or fragments comprising at least 5, 10, 15, 20, 25, 30, 35, 40, 50, 75, 100, or 150 consecutive amino acids of the preceding polypeptides as determined using the FASTA version 3.0t78 algorithm with the default parameters. Alternatively, protein identity or similarity may be identified using BLASTP with the default parameters, BLASTX with the default parameters, or TBLASTN with the default parameters. (Alschul, S. F. et al. Gapped BLAST and PSI-BLAST: A New Generation of Protein Database Search Programs, Nucleic Acid Res. 25: 3389-3402 (1997), the disclosure of which is incorporated herein by reference in its entirety).

[0137] Alternatively, homologous nucleic acids or polypeptides may be identified by searching a database to identify sequences having a desired level of homology to a nucleic acid or a polypeptide involved in proliferation or an antisense nucleic acid to a nucleic acid involved in microbial proliferation. A variety of such databases are available to those skilled in the art, including GenBank and GenSeq. In some embodiments, the databases are screened to identify nucleic acids or polypeptides having at least 97%, at least 95%, at least 90%, at least 85%, at least 80%, at least 70%, at least 60%, or at least 50%, at least 40% identity or similarity to a nucleic acid or polypeptide involved in proliferation or an antisense nucleic acid involved in proliferation. For example, the database may be screened to identify nucleic acids homologous to one of SEQ IID Nos. 1-93, 106-112, 119-122, 134-160, 164-171, 179-265, 271-273, 275, and 279-286, homologous to fragments comprising at least 10, 15, 20, 25, 30, 35, 40, 50, 75, 100, 150, 200, 300, 400, or 500 consecutive nucleotides thereof, or homologous to the sequences complementary to any of the preceding nucleic acids. In other embodiments, the databases are screened to indetify polypeptides having at least 99%, 95%, 90%, 855, 80%, 70%, 60%, 50%, 40%, or at least 25% identity or similarity ot a polypeptide involved in proliferation or a portion thereof. For example, the database may be screened to identify polypeptides homologous to a polypeptide comprising one of SEQ ID NOs. 299-305, 312-315, 327-353, 357-364, 372-458, 464-466, 468 and 472-479, a polypeptide whose expression is inhibited by a nucleic acid of one of SEQ ID NOs: 1-93, or homologous to fragments comprising at least 5, 10, 15, 20, 25, 30, 35, 40, 50, 75, 100, or 150 consecutive amino acids of any of the preceding polypeptides. In some embodiments, the database may be screened to identify homologous nucleic acids or polypeptides from organisms other than E. coli, including organisms such as Aspergillus fumigatus, Bacillus anthracis, Burkholderia cepacia, Campylobacter jejuni, Candida albicans, Candida glabrata (also called Torulopsis glabrata), Candida tropicalis, Candida parapsilosis, Candida guilliermondii, Candida krusei, Candida kefyr (also called Candida pseudotropicalis), Candida dubliniensis, Candida glabrata (also called Torulopsis glabrata), Candida tropicalis, Candida parapsilosis, Candida guilliermondii, Candida krusei, Candida kefyr (also called Candida pseudotropicalis), Candida dubliniensis, Candida glabrata (also called Torulopsis glabrata), Candida tropicalis, Candida parapsilosis, Candida guilliermondii, Candida krusei, Candida kefyr (also called Candida pseudotropicalis), Candida dubliniensis, Chlamydia pneumoniae, Chlamydia trachomatus, Clostridium botulinum, Clostridium difficile, Cryptococcus neoformans, Enterobacter cloacae, Enterococcus faecalis, Haemophilus influenzae, Helicobacter pylori, Klebsiella pneumoniae, Listeria monocytogenes, Mycobacterium leprae, Mycobacterium tuberculosis, Neisseria gonorrhoeae, Pseudomonas aeruginosa, Salmonella cholerasuis, Salmonella enterica, Salmonella paratyphi, Salmonella typhi, Salmonella typhimurium, Staphylococcus aureus, Klebsiella pneumoniae, Listeria monocytogenes, Moxarella catarrhalis, Shigella boydii, Shigella dysenteriae, Shigella flexneri, Shigella sonnei, Pseudomonas aeruginosa, Staphylococcus epidermidis, Streptococcus pneumoniae, Treponema pallidum, Yersinia pestis or any species falling within the genera of any of the above species.

[0138] In another embodiment, gene expression arrays and microarrays can be employed. Gene expression arrays are high density arrays of DNA samples deposited at specific locations on a glass chip, nylon membrane, or the like. Such arrays can be used by researchers to quantify relative gene expression under different conditions. Gene expression arrays are used by researchers to help identify optimal drug targets, profile new compounds, and determine disease pathways. An example of this technology is found in U.S. Pat. No. 5,807,522, which is hereby incorporated by reference.

[0139] It is possible to study the expression of all genes in the genome of a particular microbial organism using a single array. For example, the arrays from Genosys consist of 12×24 cm nylon filters containing PCR products corresponding to 4290 ORFs from E. coli. 10 ngs of each are spotted every 1.5 mm on the filter. Single stranded labeled cDNAs are prepared for hybridization to the array (no second strand synthesis or amplification step is done) and placed in contact with the filter. Thus the labeled cDNAs are of “antisense” orientation. Quantitative analysis is done by phosphorimager.

[0140] Hybridization of cDNA made from a sample of total cell MRNA to such an array followed by detection of binding by one or more of various techniques known to those in the art results in a signal at each location on the array to which cDNA hybridized. The intensity of the hybridization signal obtained at each location in the array thus reflects the amount of MRNA for that specific gene that was present in the sample. Comparing the results obtained for MRNA isolated from cells grown under different conditions thus allows for a comparison of the relative amount of expression of each individual gene during growth under the different conditions.

[0141] Gene expression arrays may be used to analyze the total MRNA expression pattern at various time points after induction of an antisense nucleic acid complementary to a proliferation-required gene. Analysis of the expression pattern indicated by hybridization to the array provides information on whether or not the target gene of the antisense nucleic acid is being affected by antisense induction, how quickly the antisense is affecting the target gene, and for later timepoints, what other genes are affected by antisense expression. For example, if the antisense is directed against a gene for ribosomal protein L7/L12 in the 50S subunit, its targeted MRNA may disappear first and then other mRNAs may be observed to increase, decrease or stay the same. Similarly, if the antisense is directed against a different 50S subunit ribosomal protein mRNA (e.g. L25), that mRNA may disappear first followed by changes in mRNA expression that are similar to those seen with the L7/L12 antisense expression. Thus, the mRNA expression pattern observed with an antinsense nucleic acid complementary to a proliferation required gene may identify other proliferation-required nucleic acids in the same pathway as the target of the antisense nucleic acid. In addition, the mRNA expression patterns observed with candidate drug compounds may be compared to those observed with antisense nucleic acids against a proliferation-required nucleic acid. If the mRNA expression pattern observed with the candidate drug compound is similar to that observed with the antisense nucleic acid, the drug compound may be a promising therapeutic candidate. Thus, the assay would be useful in assisting in the selection of candidate drug compounds for use in screening methods such as those described below.

[0142] In cases where the source of nucleic acid deposited on the array and the source of the nucleic acid being hybridized to the array are from two different organisms, gene expression arrays can identify homologous genes in the two organisms.

[0143] The present invention also contemplates additional methods for screening other microorganisms for proliferation-required genes. In this embodiment, the conserved portions of sequences identified as proliferation-required can be used to generate degenerate primers for use in the polyrnerase chain reaction (PCR). The PCR technique is well known in the art. The successful production of a PCR product using degenerate probes generated from the sequences identified herein would indicate the presence of a homologous gene sequence in the species being screened. This homologous gene is then isolated, expressed, and used as a target for candidate antibiotic compounds. In another aspect of this embodiment, the homologous gene is expressed in an autologous organism or in a heterologous organism in such a way as to alter the level or activity of a homologous gene required for proliferation in the autologous or heterologus organism. In still another aspect of this embodiment, the homologous gene or portion is expressed in an antisense orientation in such a way as to alter the level or activity of a nucleic acid required for proliferation of an autologous or heterologous organism.

[0144] The homologous sequences to proliferation-required genes identified using the techniques described herein may be used to identify proliferation-required genes of organisms other than E. coli, to inhibit the proliferation of organisms other than E. coli by inhibiting the activity or reducing the amount of the identified homologous nucleic acid or polypeptide in the organism other than E. coli, or to identify compounds which inhibit the growth of organisms other than E. coli as described below.

[0145] In another embodiment of the present invention, E. coli sequences identified as required for proliferation are transferred to expression vectors capable of function within non-E coli species. As would be appreciated by one of ordinary skill in the art, expression vectors must contain certain elements that are species specific. These elements can include promoter sequences, operator sequences, repressor genes, origins of replication,selectable marker genes, ribosomal binding sequences, termination sequences, and others. To use the identified exogenous sequences of the present invention, one of ordinary skill in the art would know to use standard molecular biology techniques to isolate vectors containing the sequences of interest from cultured bacterial cells, isolate and purify those sequences, and subclone those sequences into an expression vector adapted for use in the species of bacteria to be screened.

[0146] Expression vectors for a variety of other species are known in the art. For example, Cao et al. report the expression of steroid receptor fragments in Staphylococcus aureus. J. Steroid Biochem Mol Biol. 44(1):1-11 (1993). Also, Pla et al. have reported an expression vector that is functional in a number of relevant hosts including: Salmonella typhimurium, Pseudomonas putida, and Pseudomonas aeruginosa. J. Bacteriol. 172(8):4448-55 (1990). These examples demonstrate the existence of molecular biology techniques capable of constructing expression vectors for the species of bacteria of interest to the present invention.

[0147] Following the subcloning of the identified nucleic acid sequences into an expression vector functional in the microorganism of interest, the identified nucleic acid sequences are conditionally transcribed to assay for bacterial growth inhibition. Those expression vectors found to contain sequences that, when transcribed, inhibit bacterial growth are compared to the known genomic sequence of the pathogenic microorganism being screened or, if the homologous sequence from the organism being screened is not known, it may be identified and isolated by hybridization to the proliferation-required E. coli sequence interest or by amplification using primers based on the proliferation-required E. coli sequence of interest as described above.

[0148] The antisense sequences from the second organism which are identified as described above may then be operably linked to a promoter, such as an inducible promoter, and introduced into the second organism. The techniques described herein for identifying E. coli genes required for proliferation may thus be employed to determine whether the identified sequences from a second organism inhibit the proliferation of the second organism.

[0149] Antisense nucleic acids required for the proliferation of organisms other than E. coli or the genes corresponding thereto, may also be hybridized to a microarray containing the E. coli ORFs to gauge the homology between the E. coli sequences and the proliferation-required nucleic acids from other organisms. For example, the proliferation-required nucleic acid may be from Aspergillus fumigatus, Bacillus anthracis, Burkholderia cepacia, Campylobacter jejuni, Candida albicans, Candida glabrata (also called Torulopsis glabrata), Candida tropicalis, Candida parapsilosis, Candida guilliermondii, Candida krusei, Candida kefyr (also called Candida pseudotropicalis), Candida dubliniensis, Chlamydia pneumoniae, Chlamydia trachomatus, Clostridium botulinum, Clostridium difficile, Cryptococcus neoformans, Enterobacter cloacae, Enterococcus faecalis, Haemophilus influenzae, Helicobacter pylon, Klebsiella pneumoniae, Listeria monocytogenes, Mycobacterium leprae, Mycobacterium tuberculosis, Neisseria gonorrhoeae, Pseudomonas aeruginosa, Salmonella cholerasuis, Salmonella enterica, Salmonella paratyphi, Salmonella typhi, Salmonella typhimurium, Staphylococcus aureus, Klebsiella pneumoniae, Listeria monocytogenes, Moxarella catarrhalis, Shigella boydii, Shigella dysenteriae, Shigella flexneri, Shigella sonnet, Pseudomonas aeruginosa, Staphylococcus epidermidis, Streptococcus pneumoniae, Treponema pallidum, Yersinia pestis or any species falling within the genera of any of the above species. The proliferation-required nucleic acids from an organism other than E. coli may be hybridized to the array under a variety of conditions which permit hybridization to occur when the probe has different levels of homology to the sequence on the microarray. This would provide an indication of homology across the organisms as well as clues to other possible essential genes in these organisms.

[0150] In still another embodiment, the exogenous nucleic acid sequences of the present invention that inhibit bacterial growth or proliferation can be used as antisense therapeutics for killing bacteria. The antisense sequences can be complementary to the proliferation-required genes whose sequence corresponds to the exogenous nucleic acid probes identified here (i.e. the antisense nucleic acid may hybridize to the gene or a portion thereof). Alternatively, antisense therapeutics can be complementary to operons in which proliferation-required genes reside (i.e. the antisense nucleic acid may hybridize to any gene in the operon in which the proliferation-required genes reside). Further, antisense therapeutics can be complementary to a proliferation-required gene or portion thereof with or without adjacent noncoding sequences, an intragenic sequence (i.e. a sequence within a gene), an intergenic sequence (i.e. a sequence between genes), a sequence spanning at least a portion of two or more genes, a 5′ noncoding region or a 3′ noncoding region located upstream or downstream from the actual sequence that is required for bacterial proliferation or an operon containing a proliferation-required gene.

[0151] In addition to therapeutic applications, the present invention encompasses the use of nucleic acid sequences complementary to sequences required for proliferation as diagnostic tools. For example, nucleic acid probes complementary to proliferation-required sequences that are specific for particular species of microorganisms can be used as probes to identify particular microorganism species in clinical specimens. This utility provides a rapid and dependable method by which to identify the causative agent or agents of a bacterial infection. This utility would provide clinicians the ability to prescribe species specific antimicrobial compounds to treat such infections. In an extension of this utility, antibodies generated against proteins translated from mRNA transcribed from proliferation-required sequences can also be used to screen for specific microorganisms that produce such proteins in a species-specific manner.

[0152] The following examples teach the genes of the present invention and a subset of uses for the E. coli genes identified as required for proliferation. These examples are illustrative only and are not intended to limit the scope of the present invention.

### EXAMPLES

[0153] The following examples are directed to the identification and exploitation of E. coli genes required for proliferation. Methods of gene identification are discussed as well as a variety of methods to utilize the identified sequences.

[0154] Genes Identified as Required for Proliferation of E. coli

[0155] Exogenous nucleic acid sequences were cloned into an inducible expression vector and assayed for growth inhibition activity. Example 1 describes the examination of a library of exogenous nucleic acid sequences cloned into the IPTG-inducible expression vector pLEX5BA (Krause et al., J. Mol. Biol. 274: 365 (1997), the disclosure of which is incorporated herein by reference in its entirety) or a modified version of pLEX5BA, pLEX5BA-3′ in which a synthetic linker containing a T7 terminator was ligated between the PstI and HindIII sites of pLEX5BA. In particular, to construct pLEX5BA-3′, the following oligonucleotides were annealed and inserted into the PstI and HindIII sites of pLEX5BA:

[0156] 5′-GTCTAGCATAACCCCTTGGGGCCTCTAAACGGGTCCTTGAGGGGTTTTTTGA-3′ (SEQ ID NO: 480)

[0157] 5′-AGCTTCAAAAAACCCCTCAAGGACCCGTTTAGAGGCCCCAAGGGGTTAT GCTAGACTGCA-3′ (SEQ ID NO: 481)

[0158] Random fragments of E. coli genomic DNA were generated by DNAseI digestion or sonication, filled in with T4 polymerase, and cloned into the SmaI site of pLEX5BA or pLEX5BA-3′. Upon activation or induction, the expression vectors produced an RNA molecule corresponding to the subcloned exogenous nucleic acid sequences. The RNA product was in an antisense orientation with respect to the E. coli genes from which it was originally derived. This antisense RNA then interacted with sense mRNA produced from various E. coli genes and interfered with or inhibited the translation of the sense messenger RNA (mRNA) thus preventing protein production from these sense mRNA molecules. In cases where the sense MRNA encoded a protein required for the proliferation, bacterial cells containing an activated expression vector failed to grow or grew at a substantially reduced rate. Similar results have also been obtained in cases where the gene encodes a non-translated RNA, such as a ribosomal RNA.

[0159] It will be appreciated that vectors other than pLEX5BA or pLEX5BA-3′ may be used to transcribe the genomic DNA inserts. In addition, it will be appreciated that, if desired, pLEX5BA or pLEX5BA-3′ may be modified to introduce features such as stop codons in all three reading frames downstream of the genomic DNA inserts to ensure that if the genomic DNA insert encodes a polypeptide (i.e. the insert is in the sense orientation rather than the antisense orientation or the insert is in the antisense orientation but contains a cryptic ORF) translation of the polypeptide will terminate shortly after the genomic insert.

### Example 1

### Inhibition of Bacterial Proliferation after IPTG induction

[0160] To study the effects of transcriptional induction in liquid medium, growth curves were carried out by back diluting cultures 1:200 into fresh media with or without 1 mM IPTG and measuring the OD₄₅₀ every 30 minutes (min). To study the effects of transcriptional induction on solid medium, 10², 10³, 10⁴, 10⁵, 10⁶, 10⁷ and 10⁸ fold dilutions of overnight cultures were prepared. Aliquots of from 0.5 to 3 μl of these dilutions were spotted on selective agar plates with or without 1 mM IPTG. After overnight incubation, the plates were compared to assess the sensitivity of the clones to IPTG.

[0161] Of the numerous clones tested, some clones were identified as containing a sequence that inhibited E. coli growth after IPTG induction. Accordingly, the gene to which the inserted nucleic acid sequence corresponds, or a gene within the operon containing the inserted nucleic acid, may be required for proliferation in E. coli.

[0162] Characterization of Isolated Clones Negatively Affecting E. coli Proliferation

[0163] Following the identification of those inserts that, upon expression, negatively impacted E. coli growth or proliferation, the inserts were isolated and subjected to nucleic acid sequence determination.

### Example 2

### Nucleic Acid Sequence Determination of Identified Clones Expressing Nucleic Acid Fragments with Detrimental Effects of E. coil Proliferation

[0164] The nucleotide sequences for the exogenous identified sequences were determined using plasmid DNA isolated using QIAPREP (Qiagen, Valencia, Calif.) and methods supplied by the manufacturer. The primers used for sequencing the inserts were 5′-TGTTTATCAGACCGCTT -3′ (SEQ ID NO: 1) and 5′-ACAATTTCACACAGCCTC -3′ (SEQ ID NO: 2). These sequences flank the polylinker in pLEX5BA. Sequence identification numbers (SEQ ID NOs) for the identified inserts are listed in Table I and discussed below.

### Example 3

### Comparison Of Isolated Sequences to Known Sequences

[0165] The nucleic acid sequences of the subcloned fragments obtained from the expression vectors discussed above were compared to known E. coli sequences in GenBank using BLAST version 1.4 or version 2.0.6 using the following default parameters: Filtering off, cost to open a gap=5, cost to extend a gap=2, penalty for a mismatch in the blast portion of run=−3, reward for a match in the blast portion of run=1, expectation value (e)=10.0, word size=11, number of one-line descriptions=100, number of alignments to show (B)=100. BLAST is described in Altschul, J Mol Biol. 215:403-10 (1990), the disclosure of which is incorporated herein by reference in its entirety. Expression vectors were found to contain nucleic acid sequences in both the sense and antisense orientations. The presence of known genes, open reading frames, and ribosome binding sites was determined by comparison to public databases holding genetic information and various computer programs such as the Genetics Computer Group programs FRAMES and CODONPREFERENCE. Clones were designated as “antisense” if the cloned fragment was oriented to the promoter such that the RNA transcript produced was complementary to the expressed “mRNA (or non-translated RNA) from a chromosomal locus. Clones were designated as “sense” if they coded for an RNA fragment that was identical to a portion of a wild type mRNA from a chromosomal locus.

[0166] The sequences described in Examples 1-2 that inhibited bacterial proliferation and contained gene fragments in an antisense orientation are listed in Table I. This table lists each identified sequence by: a sequence identification number; a Molecule Number; a gene to which the identified sequence corresponds, listed according to the National Center for Biotechnology Information (NCBI), Blattner (Science 277:1453-1474(1997); also contains the E. coli K-12 genome sequence), or Rudd (Micro. and Mol. Rev. 62:985-1019(1998)), (both papers are hereby incorporated by reference) nomenclatures. The CONTIG numbers for each identified sequence is shown, as well as the location of the first and last base pairs located on the E. coli chromosome. A Molecule Number with a “**” indicates a clone corresponding to an intergenic sequence.

TABLE I
Identified Clones with Corresponding Genes and Operons

| | Molecule | | | | | Gene name | Gene name |
|---|---|---|---|---|---|---|---|
| SeqID | Number | Clone name | Contig | start | stop | (Blattner) | (NCBI) |
| 1 | EcXA118a | E1M10000131C06 | AE000408 | 5299 | 5440 | b3310 | rplN |
| 2 | EcXA118b | E1M10000152F04 | AE000408 | 5300 | 5452 | b3310 | rplN |
| 3 | EcXA118c | E1M10000152H04 | AE000408 | 5311 | 5450 | b3310 | rplN |
| 4 | EcXA118d | E1M10000153H03 | AE000408 | 5299 | 5475 | b3310 | rplN |
| 5 | EcXA119 | E1M10000129F10 | AE000372 | 2407 | 2153 | b2883 | b2883 |
| 6 | EcXA120 | E1M10000129G04 | AE000248 | 2494 | 2888 | b1509 | b1509 |
| 7 | EcXA121 | E1M10000119D03 | AE000491 | 1722 | 2001 | b4191 | yjfQ |
| 8 | EcXA122a | 1029-M5 | AE000300 | 232 | 1 | b2108 | yehA |
| | | | AE000299 | 10036 | 9848 | b2107 | b2107 |
| 9 | EcXA122b | X3S208-17 | AE000300 | 186 | 1 | b2108 | yehA |
| | | | AE000299 | 10036 | 9870 | b2107 | b2107 |
| 10 | EcXA122c | E1M10000124C07 | AE000299 | 10036 | 9896 | b2107 | b2107 |
| | | | AE000300 | 78 | 1 | b2108 | yehA |
| 11 | EcXA122d | E1M10000125D06 | AE000300 | 203 | 1 | b2108 | yehA |
| | | | AE000299 | 10036 | 9892 | b2107 | b2107 |
| 12 | EcXA123 | E1M10000106A08 | AE000410 | 7832 | 7968 | b3343 | yheL |
| 13 | EcXA124 | E1M10000106D02 | AE000408 | 5951 | 6225 | b3311 | rpsQ |
| | | | AE000408 | 5951 | 6225 | b3312 | rpmC |
| 14 | EcXA125 | E1M10000124D09 | AE000465 | 7071 | 7309 | b3901 | yiiL |
| 15 | EcXA126 | E1M10000124E02 | AE000441 | 9429 | 9316 | b3644 | yicC |
| 16 | EcXA127a | E1M10000124E06 | AE000369 | 1145 | 856 | b2851 | b2851 |
| 17 | EcXA127b | E1M10000159A11 | AE000369 | 1145 | 763 | b2851 | b2851 |
| 18 | EcXA128 | E1M10000124G04 | AE000171 | 6676 | 6427 | b0679 | nagE |
| 19 | EcXA129 | E1M10000127C09 | AE000123 | 1270 | 1506 | b0135, b0136 | yadC, yadK |
| 20 | EcXA130 | E1M10000146E05 | AE000450 | 9592 | 9828 | b3737, b3738 | atpE, atpB |
| 21 | EcXA131 | E1M10000162C01 | AE000383 | 11211 | 11350 | b3016 | b3016 |
| 22 | EcXA132 | E1M10000163A04 | AE000243 | 5440 | 5650 | b1465 | narV |
| 23 | EcXA133a | E1M10000120F06 | AE000408 | 5273 | 5425 | b3309, b3310 | rplX, rplN |
| 24 | EcXA133b | E1M10000132H04 | AE000408 | 5263 | 5422 | b3309, b3310 | rplX, rplN |
| 25 | EcXA133c | E1M10000172C05 | AE000408 | 5190 | 5433 | b3309, b3310 | rplX, rplN |
| 26 | EcXA134 | E1M10000162H06 | AE000402 | 4689 | 4795 | b3229 | sspA |
| 27 | EcXA136a | E1M10000147B03 | AE000373 | 1 | 251 | b2892 | recJ |
| | | | AE000372 | 11967 | 12144 | b2891 | prfB |
| 28 | EcXA136b | E1M10000155F04 | AE000373 | 1 | 372 | b2892 | recJ |
| | | | AE000372 | 12002 | 12144 | b2891 | prfB |
| 29 | EcXA137 | E1M10000142F12 | AE000132 | 9172 | 8451 | b0243, b0244 | proA, thrW |
| 30 | EcXA138 | E1M10000148B09 | AE000393 | 10354 | 10051 | b3121 | yhaC |
| 31 | EcXA139 | E1M10000143A12 | AE000189 | 3600 | 4024 | b0874 | b0874 |
| 32 | EcXA139b | E1M10000169H02 | AE000189 | 3646 | 4026 | b0874 | b0874 |
| 33 | EcXA140a | E1M10000143C10 | AE000445 | 1 | 260 | b3672 | b3672 |
| | | | AE000444 | 12573 | 12697 | b3671 | ilvB |
| 34 | EcXA140b | E1M10000151F10 | AE000445 | 1 | 378 | b3672 | b3672 |
| | | | AE000444 | 12576 | 12697 | b3671 | ilvB |
| 35 | EcXA141 | E1M10000143G09 | AE000294 | 9227 | 9498 | b2035 | rfc |
| 36 | EcXA142 | E1M10000159C10 | AE000408 | 1 | 199 | b3299 | rpmJ |
| | | | AE000407 | 10488 | 10601 | b3298 | rpsM |
| 37 | EcXA143 | E1M10000159F03 | AE000368 | 7705 | 7317 | b2846 | b2846 |
| 38 | EcXA144a | E1M10000160A03 | AE000257 | 545 | 368 | b1613 | manA |
| 39 | EcXA144b | E1M10000132F02 | AE000257 | 585 | 395 | b1613 | manA |
| 40 | EcXA144c | E1M10000153E04 | AE000257 | 552 | 395 | b1613 | manA |
| 41 | EcXA145 | E1M10000160A06 | AE000366 | 5350 | 5533 | b2827 | thyA |
| 42 | EcXA146 | E1M10000160C02 | AE000449 | 9694 | 9815 | b3725 | pstB |
| 43 | EcXA147 | E1M10000160C03 | AE000211 | 6964 | 7126 | b1111 | b1111 |
| 44 | EcXA148 | E1M10000160E10 | AE000455 | 10737 | 10577 | b3794 | rffM |
| 45 | EcXA149a | E1M10000160F11 | AE000374 | 7930 | 7680 | b2912 | ygfA |
| 46 | EcXA149b | E1M10000153F05 | AE000374 | 7910 | 7625 | b2912 | ygfA |
| 47 | EcXA150 | E1M10000160H03 | AE000442 | 5556 | 5377 | b3650 | spoT |
| 48 | EcXA151 | E1M10000144E03 | AE000429 | 8099 | 8352 | b3528 | dctA |
| 49 | EcXA152 | E1M10000144G07 | AE000308 | 1086 | 1385 | b2182 | bcr |
| 50 | EcXA153 | E1M10000144B01 | AE000477 | 4261 | 4055 | b4038 | yjbI |
| 51 | EcXA154 | E1M10000150E02 | AE000290 | 5618 | 5406 | b1983 | b1983 |
| 52 | EcXA155 | E1M10000150E06 | AE000339 | 116 | 496 | b2522 | sseB |
| 53 | EcXA156 | E1M10000156B08 | AE000463 | 2852 | 2699 | b3874 | yihN |
| 54 | EcXA157 | E1M10000156D07 | AE000408 | 7274 | 7464 | b3314, b3315 | rpsC, rplV |
| 55 | EcXA158 | E1M10000156G12 | AE000338 | 5181 | 5370 | b2519 | b2519 |
| 56 | EcXA159 | E1M10000151G10 | AE000154 | 7217 | 7618 | b0482 | b0482 |
| 57 | EcXA160 | E1M10000166G06 | AE000269 | 4488 | 5074 | b1744 | b1744 |
| 58 | EcXA161 | 869.A23 | AE000146 | 3702 | 3950 | b0398 | sbcD |
| 59 | EcXA162 | E1M10000112F05 | AE000497 | 7921 | 8156 | b4267 | yjgV |
| 60 | EcXA163 | E1M10000118B05 | AE000447 | 8832 | 8741 | b3705 | yidC |
| 61 | EcXA164 | E1M10000118C04 | AE000314 | 6749 | 6688 | b2243 | glpC |
| 62 | EcXA165 | E1M10000118C05 | AE000170 | 219 | 290 | b0655 | ybeJ |
| 63 | EcXA166 | E1M10000118G06 | AE000461 | 5835 | 5770 | b3859 | yihE |
| 64 | EcXA167 | E1M10000119A05 | AE000298 | 9388 | 9521 | b2093 | gatB |
| 65 | EcXA168 | E1M10000123E09 | AE000267 | 4622 | 4413 | b1721 | b1721 |
| 66 | EcXA169 | E1M10000123F11 | AE000408 | 2650 | 2767 | b3303 | rpsE |
| 67 | EcXA170 | E1M10000129G01 | AE000143 | 3523 | 3913 | b0363 | b0363 |
| 68 | EcXA171 | E1M10000132G08 | AE000189 | 6799 | 6699 | b0876 | b0876 |
| 69 | EcXA172 | E1M10000139B11 | AE000323 | 3697 | 3531 | b2345 | b2345 |
| 70 | EcXA173 | E1M10000153A09 | AE000424 | 6886 | 6968 | b3485 | yhhJ |
| 71 | EcXA174 | E1M10000153C04 | AE000377 | 8932 | 8832 | b2945 | endA |
| 72 | EcXA175 | E1M10000154F03 | AE000279 | 7957 | 7837 | b1854 | pykA |
| 73 | EcXA176 | E1M10000157B02 | AE000485 | 4932 | 5094 | b4125 | yjdH |
| 74 | EcXA177 | E1M10000160H05 | AE000326 | 3140 | 3035 | b2378 | b2378 |
| 75 | EcXA178 | E1M10000163H01 | AE000113 | 1 | 266 | b0023 | rpsT |
| 76 | EcXA179 | E1M10000164G04 | AE000262 | 233 | 1 | b1665 | valV |
| 77 | EcXA180 | E1M10000168F02 | AE000480 | 3110 | 3350 | b4066 | yjcF |
| 78 | EcXA181 | E1M10000169D08 | AE000469 | 10535 | 10604 | b3956 | ppc |
| 79 | EcXA182 | E1M10000169H07 | AE000376 | 10447 | 10586 | b2935 | tktA |
| 80 | EcXA183 | E1M10000169H08 | AE000118 | 8416 | 8228 | b0084 | ftsI |
| 81 | EcXA184 | E1M10000172C01 | AE000358 | 8498 | 8844 | b2750 | cysC |
| 82 | EcXA185 | E1M10000176C01 | AE000407 | 10053 | 10119 | b3297 | rpsK |
| 83 | EcXA186 | E1M10000176F01 | AE000135 | 987 | 812 | b0270 | yagG |
| 84 | EcXA187 | P319-3.M16 | AE000317 | 2279 | 1872 | b2271 | b2271 |
| 85 | EcXA188 | P347.2 | AE000211 | 7845 | 8005 | b1113 | b1113 |
| 86 | EcXA189a | E1M10000168A04 | AE000277 | 2048 | 1861 | b1828 | b1828 |
| 87 | EcXA189b | E1M10000125F09 | AE000277 | 2042 | 1868 | b1828 | b1828 |
| 88 | EcXA189c | E1M10000113F02 | AE000277 | 2050 | 1857 | b1828 | b1828 |
| 89 | EcXA190a | E1M10000161D04 | AE000387 | 49 | 312 | b3052 | b3052 |
| 90 | EcXA190b | E1M10000155B11 | AE000387 | 49 | 285 | b3052 | b3052 |
| 91 | EcXA191a | E1M10000167H09 | AE000451 | 18 | 220 | b3740 | gidB |
| 92 | EcXA191b | E1M10000120H05 | AE000451 | 1 | 188 | b3740 | gidB |
| 93 | EcXA192 | E1M10000154H07 | AE000452 | 3326 | 3106 | b3750, b3751 | rbsC, rpsB |

### Example 4

### Identification of Genes and their Corresponding Operons Affected by Antisense Inhibition

[0167] The sequencing of the entire E. coli genome is described in Blattner et al., Science 277:1453-1474(1997) the entirety of which is hereby incorporated by reference and the sequence of the genome is listed in GenBank Accession No.U00096, the disclosure of which is incorporated herein by reference in its entirety. The operons to which the proliferation-inhibiting nucleic acids correspond were identified using RegulonDB and information in the literature. The coordinates of the boundaries of these operons on the E. coli genome are listed in Table III. Table II lists the molecule numbers of the inserts containing the growth inhibiting nucleic acid fragments, the genes in the operons corresponding to the inserts, the SEQ ID NOs of the genes containing the inserts, the SEQ ID NOs of the proteins encoded by the genes, the start and stop points of the genes on the E. coli genome, the orientation of the genes on the genome, whether the operons are predicted or documented, and the predicted functions of the genes. The identified operons, their putative functions, and whether or not the genes are presently thought to be required for proliferation are discussed below.

[0168] Functions for the identified genes were determined by using either Blattner functional class designations or by comparing identified sequence with known sequences in various databases. A variety of biological functions were noted for the genes to which the clones of the present invention correspond. The finctions for the genes of interest appear in Table II.

[0169] The proteins that are listed in Table II are involved in a wide range of biological functions.

TABLE II
All Operon Data with Whole Chromosome Coordinates

| Molecule | | Seq ID | Seq ID | | | | operon | |
|---|---|---|---|---|---|---|---|---|
| Number | Gene | (Gene) | (Protein) | Start | Stop | Orientation | prediction | Predicted function |
| EcXA118a-d | rpmj | 94 | 287 | 3440255 | 3440371 | < | documented | 50S ribosomal subunit protein X (L36) |
| | prlA | 95 | 288 | 3440403 | 3441734 | < | | SecY: multispanning membrane protein, |
| | | | | | | | | translocator of proteins |
| | rplO | 96 | 289 | 3441742 | 3442176 | < | | 50S ribosomal subunit protein L15 |
| | rpmD | 97 | 290 | 3442180 | 3442359 | < | | 50S ribosomal subunit protein L30 |
| | rpsE | 98 | 291 | 3442363 | 3442866 | < | | eps, spc, spcA; 30S ribosomal subunit |
| | | | | | | | | protein S5 |
| | rplR | 99 | 292 | 3442881 | 3443234 | < | | 50S ribosomal subunit protein L18 |
| | rplF | 100 | 293 | 3443244 | 3443777 | < | | 50S ribosomal subunit protein L6; |
| | | | | | | | | gentamicin sensitivity |
| | rpsH | 101 | 294 | 3443790 | 3444182 | < | | 30S ribosomal subunit protein S8 |
| | rpsN | 102 | 295 | 3444216 | 3444521 | < | | 30S ribosomal subunit protein S14 |
| | rplE | 103 | 296 | 3444536 | 3445075 | < | | 50S ribosomal subunit protein L5 |
| | rplX | 104 | 297 | 3445090 | 3445404 | < | | 50S ribosomal subunit protein L24 |
| | rplN | 105 | 298 | 3445415 | 3445786 | < | | 50S ribosomal subunit protein L14 |
| EcXA119 | b2882 | 106 | 299 | 3022315 | 3023772 | > | predicted | Unknown |
| | b2883 | 107 | 300 | 3023787 | 3025106 | > | | Unknown |
| | b2884 | 108 | 301 | 3025142 | 3025711 | > | | Unknown |
| | b2885 | 109 | 302 | 3025678 | 3026508 | > | | Unknown |
| EcXA120 | b1509 | 110 | 303 | 1590689 | 1592089 | < | predicted | Unknown |
| | ydeK | 111 | 304 | 1592133 | 1596110 | < | | Unknown |
| EcXA121 | yffQ | 112 | 305 | 4415276 | 4416031 | < | predicted | Unknown |
| EcXA122 | b2106 | 113 | 306 | 2183937 | 2184761 | > | predicted | Unknown |
| | b2107 | 114 | 307 | 2184800 | 2185318 | > | | Unknown |
| | yehA | 115 | 308 | 2185400 | 2186434 | < | predicted | Unknown |
| | yehB | 116 | 309 | 2186450 | 2188930 | < | | Unknown |
| | yehC | 117 | 310 | 2188946 | 2189665 | < | | Unknown |
| | yehD | 118 | 311 | 2189700 | 2190242 | < | | Unknown |
| EcXA123 | yheL | 119 | 312 | 3472315 | 3472602 | < | predicted | Unknown |
| | b3344 | 120 | 313 | 3472610 | 3472969 | < | | Unknown |
| | yheN | 121 | 314 | 3472969 | 3473355 | < | | Unknown |
| | b3346 | 122 | 315 | 3473355 | 3474089 | < | | Unknown |
| EcXA124 | rpsQ | 123 | 316 | 3445951 | 3446205 | < | documented | neaA; 30S ribosomal subunit protein S17 |
| | rpmC | 124 | 317 | 3446205 | 3446396 | < | | 50S ribosomal subunit protein L29 |
| | rplP | 125 | 318 | 3446396 | 3446806 | < | | 50S ribosomal subunit protein L16 |
| | rpsC | 126 | 319 | 3446819 | 3447520 | < | | 30S ribosomal subunit protein S3 |
| | rplV | 127 | 320 | 3447538 | 3447870 | < | | eryB; erythromycin sensitivity; 50S |
| | | | | | | | | ribosomal subunit protein L22 |
| | rpsS | 128 | 321 | 3447885 | 3448163 | < | | 30S ribosomal subunit protein S19 |
| | rplB | 129 | 322 | 3448180 | 3449001 | < | | 50S ribosomal subunit protein L2 |
| | rplW | 130 | 323 | 3449019 | 3449321 | < | | 50S ribosomal subunit protein L23 |
| | rplD | 131 | 324 | 3449318 | 3449923 | < | | eryA; 50S ribosomal subunit protein L4; |
| | | | | | | | | erythromycin sensitivity |
| | rplC | 132 | 325 | 3449934 | 3450563 | < | | 50S ribosomal subunit protein L3 |
| | rpsJ | 133 | 326 | 3450596 | 3450907 | < | | nusE; 30S ribosomal subunit protein S10 |
| EcXA125 | yiiL | 134 | 327 | 4090705 | 4091019 | < | predicted | Unknown |
| EcXA126 | yicC | 135 | 328 | 3814303 | 3815166 | > | predicted | Unknown |
| EcXA127a-b | b2851 | 136 | 329 | 2989290 | 2989781 | > | predicted | Unknown |
| EcXA128 | nagE | 137 | 330 | 703167 | 705113 | > | documented | pstN; N-acetylglucosamine-specific enzyme |
| | | | | | | | | II of phosphotransferase system |
| EcXA129 | yadC | 138 | 331 | 149715 | 150953 | < | predicted | Unknown |
| | yadK | 139 | 332 | 151003 | 151599 | < | | Unknown |
| | yadL | 140 | 333 | 151626 | 152231 | < | | Unknown |
| | yadM | 141 | 334 | 152243 | 152854 | < | | Unknown |
| EcXA130 | atpC | 142 | 335 | 3913181 | 3913600 | < | documented | papG, uncC; membrane-bound ATP |
| | | | | | | | | synthase, F1 sector, -subunit (EC 3.6.1.3) |
| | atpD | 143 | 336 | 3913621 | 3915003 | < | | papB, uncD; membrane-bound ATP |
| | | | | | | | | synthase, F1 sector, -subunit (EC 3.6.1.3) |
| | atpG | 144 | 337 | 3915030 | 3915893 | < | | papC, uncG; membrane-bound ATP |
| | | | | | | | | synthase, F1 sector, -subunit (EC 3.6.1.3) |
| | atpA | 145 | 338 | 3915944 | 3917485 | < | | papA, uncA; membrane-bound ATP |
| | | | | | | | | synthase, F1 sector, -subunit (EC 3.6.1.3) |
| | atpH | 146 | 339 | 3917498 | 3918031 | < | | papE, uncH; membrane-bound ATP |
| | | | | | | | | synthase, F1 sector, -subunit (EG 3.6.1.3) |
| | atpF | 147 | 340 | 3918046 | 3918516 | < | | papF, uncF; membrane-bound ATP |
| | | | | | | | | synthase, F0 sector, subunit b (EC 3.6.1.3) |
| | atpE | 148 | 341 | 3918578 | 3918817 | < | | papH, uncE; membrane-bound ATP |
| | | | | | | | | synthase, F0 sector, subunit C; DCCD (EC |
| | | | | | | | | 3.6.1.3) |
| | atpB | 149 | 342 | 3918864 | 3919679 | < | | papD, uncB; membrane-bound ATP |
| | | | | | | | | synthase, F0 sector, subunit a (EC 3.6.1.3) |
| | atpI | 150 | 343 | 3919688 | 3920080 | < | | uncI; membrane-bound ATP synthase |
| | | | | | | | | subunit, F1-F0-type proton-ATPase (EC |
| | | | | | | | | 3.6.1.34) |
| EcXA131 | b3015 | 151 | 344 | 3156944 | 3158185 | < | predicted | Unknown |
| | b3016 | 152 | 345 | 3158185 | 3159162 | < | | Unknown |
| EcXA132 | narV | 153 | 346 | 1533961 | 1534641 | < | documented | regulationCryptic nitrate reductase II, - |
| | | | | | | | | subunit |
| | narW | 154 | 347 | 1534638 | 1535333 | < | | regulationCryptic nitrate reductase II, - |
| | | | | | | | | subunit |
| | narY | 155 | 348 | 1535333 | 1536877 | < | | regulationCryptic NR II, -subunit |
| | narZ | 156 | 349 | 1536874 | 1540614 | < | | regulationCryptic NR II, -subunit |
| EcXA133a-c | | | | | | | Same | |
| | | | | | | | operon as | |
| | | | | | | | EcXA118 | |
| EcXA134 | sspB | 157 | 350 | 3373914 | 3374411 | < | documented | Stress response protein |
| | sspA | 158 | 351 | 3374417 | 3375055 | < | | pog; stress response protein |
| EcXA136a-b | lysS | 159 | 352 | 3031677 | 3033194 | < | documented | asuD herC; lysyl tRNA synthetase, |
| | | | | | | | | constitutive |
| | prfB | 160 | 353 | 3033204 | 3034302 | < | | supK; peptide chain release factor 2 |
| | recJ | 161 | 354 | 3034393 | 3036126 | < | predicted | Single-stranded DNA-specific exonuclease, |
| | | | | | | | | 5-3 |
| | dsbC | 162 | 355 | 3036132 | 3036842 | < | | xprA; periplasmic disulfide oxidoreductase, |
| | | | | | | | | protein disulfide isomerase |
| | xerD | 163 | 356 | 3036867 | 3037763 | < | | xprB; recombinase, site specific |
| EcXA137 | proB | 164 | 357 | 259612 | 260715 | > | documented | pro2; -glutamyl kinase (EC 2.7.2.11) |
| | proA | 165 | 358 | 260727 | 261980 | > | | pro1; -glutamyl phosphate reductase (EC |
| | | | | | | | | 1.2.1.41) |
| EcXA138 | yhaB | 166 | 359 | 3265474 | 3266034 | > | predicted | |
| | yhaC | 167 | 360 | 3266056 | 3267243 | > | | |
| EcXA139a-b | b0874 | 168 | 361 | 913181 | 914128 | < | predicted | |
| EcXA140a-b | ilvN | 169 | 362 | 3848429 | 3848719 | < | documented | Acetohydroxy acid synthase I, small subunit |
| | | | | | | | | (EC 4.1.3.18); valine sensitive small |
| | | | | | | | | subunit;positive regulator for thr and ilv |
| | ilvB | 170 | 363 | 3848723 | 3850411 | < | | Acetolactate synthase I, valine sensitive (EC |
| | | | | | | | | 4.1.3.18) |
| | b3672 | 171 | 364 | 3850517 | 3850615 | < | | |
| EcXA141 | yi52_7 | 172 | 365 | 2099917 | 2100933 | < | predicted | nucleotide sequence and phylogenetic |
| | | | | | | | | relationships of a new E. coli insertion |
| | | | | | | | | element. Schwartz E |
| | yefJ | 173 | 366 | 2100938 | 2101411 | < | | Unknown |
| | yefI | 174 | 367 | 2101413 | 2102531 | < | | Unknown |
| | yefH | 175 | 368 | 2102516 | 2103106 | < | | Unknown |
| | yefG | 176 | 369 | 2103087 | 2104079 | < | | Unknown |
| | rfc | 177 | 370 | 2104082 | 2105248 | < | | O-antigen polymerase |
| | yefE | 178 | 371 | 2105248 | 2106351 | < | | Unknown |
| EcXA142 | | | | | | | Same | |
| | | | | | | | operon as | |
| | | | | | | | EcXA118 | |
| EcXA143 | b2846 | 179 | 372 | 2985498 | 2986190 | > | predicted | Unknown |
| EcXA144a-c | manA | 180 | 373 | 1686600 | 1687775 | > | predicted | pmi; mannosephosphate isomerase (EC |
| | | | | | | | | 5.3.1.8) |
| EcXA145 | thyA | 181 | 374 | 2962383 | 2963177 | < | documented | Aminopterin, trimethoprim resistance; |
| | | | | | | | | thymidylate synthetase (EC 2.1.1.45) |
| | lgt | 182 | 375 | 2963184 | 2964059 | < | | transferaseumpA; |
| | | | | | | | | phosphatidylglycerol:prolipoprotein |
| | | | | | | | | diacylglycerol transferase |
| EcXA146 | phoU | 183 | 376 | 3904481 | 3905206 | < | documented | phoT; P uptake, high-affinity P-specific |
| | | | | | | | | transport system, regulatory gene |
| | pstB | 184 | 377 | 3905221 | 3905994 | < | | phoT; high-affinity P-specific transport; |
| | | | | | | | | cytoplasmic ATP-binding protein |
| | pstA | 185 | 378 | 3906177 | 3907067 | < | | R2pho, phoR2b, phoT; high-affinity P- |
| | | | | | | | | specific transport |
| | pstC | 186 | 379 | 3907067 | 3908026 | < | | phoW; high-affinity P-specific transport; |
| | | | | | | | | cytoplasmic membrane component |
| | pstS | 187 | 380 | 3908113 | 3909153 | < | | phoR2, nmpA, phoR2a, phoS, R2pho; high- |
| | | | | | | | | affinity P-specific transport; periplasmic |
| | | | | | | | | Pbinding |
| EcXA147 | b1111 | 188 | 381 | 1167423 | 1168133 | < | predicted | Unknown |
| EcXA148 | yifH | 189 | 382 | 3972208 | 3972753 | > | predicted | Unknown |
| | yifI | 190 | 383 | 3972758 | 3973888 | > | | Unknown |
| | yifJ | 191 | 384 | 3973890 | 3975140 | > | | Unknown |
| | rffT | 192 | 385 | 3976214 | 3977566 | > | | Synthesis of enterobacterial common antigen; |
| | | | | | | | | Fuc4NAc transferase |
| | rffM | 193 | 386 | 3977569 | 3978309 | > | | UDP-ManNAcAtransferase |
| | b4404 | 194 | 387 | 3975137 | 3975361 | > | | Unknown |
| | b4405 | 195 | 388 | 3975603 | 3976217 | > | | Unknown |
| EcXA149a-b | ygfA | 196 | 389 | 3054261 | 3054809 | > | predicted | Unknown |
| EcXA150 | rpoZ | 197 | 390 | 3819733 | 3820008 | > | documented | spoS; RNA polymerase, |
| | spoT | 198 | 391 | 3820027 | 3822135 | > | | Guanosine 5-diphosphate, 3-diphosphate |
| | | | | | | | | pyrophosphatase, ppGpp synthetase II |
| | | | | | | | | activity |
| | spoU | 199 | 392 | 3822142 | 3822831 | > | | |
| | recG | 200 | 393 | 3822837 | 3824918 | > | | spoV? branch migration of Holliday |
| | | | | | | | | junctions, junction-specific DNA helicase |
| | | | | | | | | (see ruvABC) |
| EcXA151 | dctA | 201 | 394 | 3679791 | 3681077 | < | predicted | Uptake of C-4 dicarboxylic acids; 3- |
| | | | | | | | | fluoromalate resistance, D-tartrate resistant |
| EcXA152 | bcr | 202 | 395 | 2276590 | 2277780 | < | predicted | bicA, bicR, sur, suxA; transmembrane; |
| | | | | | | | | affects sulfathiazole-sulfonamide resistance |
| | yejD | 203 | 396 | 2277808 | 2278503 | < | | Unknown |
| EcXA153 | yjbI | 204 | 397 | 4248534 | 4249862 | > | predicted | Unknown |
| EcXA154 | b1983 | 205 | 398 | 2054880 | 2055596 | > | predicted | Unknown |
| EcXA155 | sseB | 206 | 399 | 2652177 | 2652962 | < | predicted | Enhances serine sensitivity (inhibits |
| | | | | | | | | homoserine deHase) on lactate; weaker than |
| | | | | | | | | sseA |
| EcXA156 | yihN | 207 | 400 | 4059826 | 4061091 | > | predicted | Unknown |
| EcXA157 | | | | | | | Same | Unknown |
| | | | | | | | operon as | |
| | | | | | | | EcXA124 | |
| EcXA158 | b2519 | 208 | 401 | 2643033 | 2645345 | < | predicted | Unknown |
| | b2520 | 209 | 402 | 2645346 | 2650307 | < | | Unknown |
| EcXA159 | b0482 | 210 | 403 | 506510 | 507304 | < | predicted | Unknown |
| EcXA160 | b1744 | 211 | 404 | 1823979 | 1824947 | < | predicted | Unknown |
| | b1745 | 212 | 405 | 1824940 | 1826283 | < | | Unknown |
| | b1746 | 213 | 406 | 1826280 | 1827758 | < | | Unknown |
| | b1747 | 214 | 407 | 1827755 | 1828789 | < | | Unknown |
| | b1748 | 215 | 408 | 1828786 | 1830006 | < | | Unknown |
| EcXA161 | sbcC | 216 | 409 | 411831 | 414977 | < | predicted | Cosuppressor with sbcB of recB recC |
| | | | | | | | | mutations |
| | sbcD | 217 | 410 | 414974 | 416176 | < | | Cosuppressor with sbcB of recB recC |
| | | | | | | | | mutations |
| EcXA162 | yjgU | 218 | 411 | 4490155 | 4490919 | < | predicted | Unknown |
| | yjgV | 219 | 412 | 4490943 | 4491974 | < | | Unknown |
| EcXA163 | yidC | 220 | 413 | 3882705 | 3884351 | > | predicted | Unknown |
| EcXA164 | glpA | 221 | 414 | 2350667 | 2352295 | > | documented | Glycerol-3-phosphate dehydrogenase |
| | | | | | | | | (anaerobic) large subunit (EC 1.1.99.5) |
| | glpB | 222 | 415 | 2352285 | 2353544 | > | | sn-Glycerol-3-phosphate dehydrogenase |
| | | | | | | | | (anaerobic) subunit (EC 1.1.99.5); |
| | | | | | | | | membraneanchor |
| | glpC | 223 | 416 | 2353541 | 2354731 | > | | sn-Glycerol-3-phosphate dehydrogenase |
| | | | | | | | | (anaerobic) small subunit (EC 1.1.99.5) |
| EcXA165 | ybeJ | 224 | 417 | 686062 | 686970 | < | predicted | Unknown |
| EcXA166 | yihE | 225 | 418 | 4039996 | 4040982 | > | predicted | Unknown |
| | dsbA | 226 | 419 | 4040999 | 4041625 | > | | iarA, ppfA; disulfide oxidoreductase, |
| | | | | | | | | periplasmic protein disulfide-isomerase; role |
| | | | | | | | | incytochrome c synthesis (EC 5.3.4.1) |
| EcXA167 | gatR_2 | 227 | 420 | 2169417 | 2169755 | < | documented | |
| | gatD | 228 | 421 | 2169855 | 2170895 | < | | Galactitol-1-phosphate dehydrogenase |
| | gatC | 229 | 422 | 2170943 | 2172298 | < | | Galactitol-specific enzyme IIC of PTS |
| | gatB | 230 | 423 | 2172302 | 2172586 | < | | Galactitol-specific enzyme IIB of PTS |
| | gatA | 231 | 424 | 2172617 | 2173069 | < | | Galactitol-specific enzyme IIA of |
| | | | | | | | | phosphotransferase system (PTS) |
| | gatZ | 232 | 425 | 2173079 | 2174341 | < | | Function unknown |
| | gatY | 233 | 426 | 2174370 | 2175230 | < | | D-Tagatose-1,6-bisphosphate aldolase |
| EcXA168 | b1720 | 234 | 427 | 1801118 | 1801591 | > | predicted | Unknown |
| | b1721 | 235 | 428 | 1801602 | 1803017 | > | | Unknown |
| EcXA169 | | | | | | | Same | Unknown |
| | | | | | | | operon as | |
| | | | | | | | EcXA118 | |
| EcXA170 | b0362 | 236 | 429 | 381728 | 382114 | < | predicted | Unknown |
| | b0363 | 237 | 430 | 381963 | 383159 | < | | Unknown |
| EcXA171 | b0876 | 238 | 431 | 915696 | 917354 | > | predicted | Unknown |
| EcXA172 | b2345 | 239 | 432 | 2461032 | 2462090 | > | predicted | Unknown |
| EcXA173 | yhhJ | 240 | 433 | 3623310 | 3624437 | < | predicted | Unknown |
| | b3486 | 241 | 434 | 3624434 | 3627118 | < | | Unknown |
| | yhiI | 242 | 435 | 3627165 | 3628232 | < | | Unknown |
| EcXA174 | endA | 243 | 436 | 3088366 | 3089073 | > | predicted | DNA-specific endonuclease I; extensive |
| | | | | | | | | DNA breakdown |
| EcXA175 | pykA | 244 | 437 | 1935673 | 1937115 | > | predicted | Pyruvate kinase A (II); (EC 2.7.1.40) |
| EcXA176 | yjdG | 245 | 438 | 4346893 | 4347612 | < | predicted | Unknown |
| | yjdH | 246 | 439 | 4347609 | 4349240 | < | | Unknown |
| EcXA177 | b2378 | 247 | 440 | 2493599 | 2494585 | > | predicted | Unknown |
| EcXA178 | rpsT | 248 | 441 | 20815 | 21078 | < | predicted | sups2O; 30S ribosomal subunit protein S20 |
| EcXA180 | yjcF | 249 | 442 | 4279362 | 4280654 | < | predicted | Unknown |
| EcXA181 | ppc | 250 | 443 | 4148026 | 4150677 | < | predicted | asp, glu; phosphoenolpyruvate carboxylase |
| | | | | | | | | (EC 4.1.1.3 1) |
| EcXA182 | tktA | 251 | 444 | 3077663 | 3079654 | < | predicted | Transketolase (EC 2.2.1.1) |
| EcXA183 | yabB | 252 | 445 | 89634 | 90092 | > | predicted | Unknown |
| | yabC | 253 | 446 | 90094 | 91035 | > | | Unknown |
| | ftsL | 254 | 447 | 91032 | 91397 | > | | sensitiveCell division and growth; essential |
| | | | | | | | | gene; cytoplasmic membrane protein |
| | ftsI | 255 | 448 | 91413 | 93179 | > | | sensitivepbpB, sep; peptidoglycan |
| | | | | | | | | synthetase; penicillin-binding protein 3 |
| | murE | 256 | 449 | 93166 | 94653 | > | | meso-Diaminopimelate adding enzyme |
| | murF | 257 | 450 | 94650 | 96008 | > | | mra; D-alanyl:D-alanine adding enzyme |
| | mraY | 258 | 451 | 96002 | 97084 | > | | UDP-N-acetylmuramoyl- |
| | | | | | | | | pentapeptide:undecaprenyl-PO4 phosphatase |
| | | | | | | | | (EC 2.7.8.13) |
| | murD | 259 | 452 | 97087 | 98403 | > | | UDP-N-acetylmuramoyl-L-alanine:D- |
| | | | | | | | | glutamate ligase (EC 6.3.2.9) |
| | ftsW | 260 | 453 | 98403 | 99647 | > | | sensitiveCytoplasmic membrane required for |
| | | | | | | | | PBP 2 expression; homology to rodA |
| | murG | 261 | 454 | 99644 | 100711 | > | | UDP-NAc-glucosamine: NAc-muramyl- |
| | | | | | | | | (pentapeptide) pyrophosphoryl- |
| | | | | | | | | undecaprenolNAc-glucosamine transferase |
| | murC | 262 | 455 | 100765 | 102240 | > | | L-Alanine adding enzyme |
| | ddlB | 263 | 456 | 102233 | 103153 | > | | ddl; D-Alanine:D-alanine ligase |
| EcXA184 | cysC | 264 | 457 | 2871410 | 2872015 | < | documented | Adenylylsulfate kinase (EC 2.7.1.25) |
| | cysN | 265 | 458 | 2872015 | 2873442 | < | | ATP sulfurylase (ATP:sulfate |
| | | | | | | | | adenylyltransferase) |
| EcXA185 | rplQ | 266 | 459 | 3437253 | 3437636 | < | documented | 50S ribosomal subunit protein L17 |
| | rpoA | 267 | 460 | 3437677 | 3438666 | < | | phs, sez; phage P2 vir1 resistance; RNA |
| | | | | | | | | polymerase, -subunit (EC 2.7.7.6) |
| | rpsD | 268 | 461 | 3438692 | 3439312 | < | | ramA, sud2; 30S ribosomal subunit protein |
| | | | | | | | | S4 |
| | rpsK | 269 | 462 | 3439346 | 3439735 | < | | 30S ribosomal subunit protein S11 |
| | rpsM | 270 | 463 | 3439752 | 3440108 | < | | 30S ribosomal subunit protein S13 |
| EcXA186 | yagG | 271 | 464 | 284619 | 286001 | > | predicted | Unknown |
| | b0271 | 272 | 465 | 286013 | 287623 | > | | Unknown |
| EcXA187 | b2271 | 273 | 466 | 2383874 | 2384851 | > | predicted | Unknown |
| EcXA188 | b1113 | 274 | 467 | 1168635 | 1169597 | < | predicted | Unknown |
| EcXA189a-c | b1828 | 275 | 468 | 1908189 | 1909673 | > | predicted | Unknown |
| EcXA190a-b | b3052 | 276 | 469 | 3192961 | 3194394 | < | predicted | Unknown |
| | glnE | 277 | 470 | 3194442 | 3197282 | < | | GS adenylyl transferase (EC 2.7.7.42) |
| | ygiF | 278 | 471 | 3197305 | 3198606 | < | | Unknown |
| EcXA191a-b | gidB | 279 | 472 | 3920685 | 3921308 | < | predicted | Glucose effects on cell division, perhaps |
| | | | | | | | | replication |
| | gidA | 280 | 473 | 3921372 | 3923261 | < | | Glucose effects on cell division, perhaps |
| | | | | | | | | replication |
| | mioC | 281 | 474 | 3923640 | 3924083 | < | | Initiation of replication; transcription of 16- |
| | | | | | | | | kDa protein proceeds through ori |
| EcXA192 | rbsD | 282 | 475 | 3930941 | 3931396 | > | documented | rbsP; D-ribose high-affinity transport system |
| | rbsA | 283 | 476 | 3931404 | 3932909 | > | | rbsP, rbsT; D-ribose high-affinity transport |
| | | | | | | | | system (may have chemotaxis function) |
| | rbsC | 284 | 477 | 3932914 | 3933879 | > | | rbsP, rbsT; D-ribose high-affinity transport |
| | | | | | | | | system |
| | rbsB | 285 | 478 | 3933904 | 3934794 | > | | prlB, rbsP; D-ribose periplasmic binding |
| | | | | | | | | protein |
| | rbsK | 286 | 479 | 3934920 | 3935849 | > | | Ribokinase (EC 2.7.1.15) |

[0170] Functions for the identified genes were assigned using either Blattner functional class designations, functions referenced in Berlyn, MKB “Linkage Map of Escherichia coli K-12, Edition 10: The Traditional Map”. (1998) Microbiol. Mol. Biol. Rev. September 62 (3): 814-984, or by comparing identified sequence with known sequences in various databases. A variety of biological functions were noted for the genes to which the clones of the present invention correspond. Biological functions for genes that lie on the same operon as an identified gene have also been made. The functions for the genes of interest appear in Table II.

[0171] The genes of interest have a variety of biological functions. For example, genes that are thought to function as transport or binding proteins, that participate in translation or post-translational modification, that are involved in carbon compound catabolism, that are thought to be enzymes, participate in cell processes, energy metabolism and biosynthetic functions appear in Table II. Genes that are involved in cell structure, transcription, RNA processing and degradation also appear in Table II.

[0172] Several of the expression vectors contain fragments that correspond to genes of unknown function or if the function is known, it is not known whether the gene is essential. For example, EcXA119, 120, 121, 122a-d, 123, 125, 126, 127a-b, 128, 129, 131, 132, 138, 139a-b, 141, 143, 146, 147, 14, 149a-b, 152, 153, 154, 155, 156, 158, 159, 160, 162, 163, 164, 165, 166, 167, 168, 170, 171, 172, 173, 176, 177, 180, 181, 186, 187, 188, 189a-b, 190a-b, 191a-b, and 192 are all exogenous nucleic acid sequences that correspond to E. coli proteins that have no known function or where the function has not been shown to be essential or nonessential.

[0173] The present invention reports a number of novel E. coli genes and operons that are required for proliferation. From the list of clone sequences identified here, each was identified to be a portion of a gene in an operon required for the proliferation of E. coli. Cloned sequences corresponding to genes already known to be required for proliferation in E. coli include EcXA118a-d, 124, 130, 133a-c, 136a-b, 142, 145, 150, 157, 169, 178, 182, 183 and 185 are exogenous nucleic acid sequences that correspond to E. coli genes that are known to be required for cellular proliferation. The remaining identified sequences correspond to E. coli genes previously undesignated as required for proliferation in the art.

[0174] An interesting observation of the present invention is that there are also several sequence fragments that correspond to E. coli genes that are not thought to be required for E. coli proliferation. Nevertheless, under the conditions described above, the antisense expression of these gene fragments causes a reduction in cell growth. This result implies that the genes corresponding to the identified sequences are actually required for proliferation or are in operons required for proliferation. Molecule Nos. corresponding to these genes are EcXA128, 134, 137, 140a-b, 144a-c, 151, 161, 174, 175, and 184.

[0175] Following identification of the sequences of interest, these sequences were localized into operons. Since bacterial genes are expressed in a polycistronic manner, the antisense inhibition of a single gene in an operon might effect the expression of all the other genes on the operon or the genes down stream from the single gene identified. In order to determine which of the gene products in an operon are required for proliferation, each of the genes contained within an operon may be analyzed for their effect on viability as described below.

TABLE III
Operon Boundaries

| Molecule Number | Start | Stop |
|---|---|---|
| EcXA118a-d | 3440255 | 3445786 |
| EcXA119 | 3022315 | 3026508 |
| EcXA120 | 1590689 | 1596110 |
| EcXA121 | 4415276 | 4416031 |
| EcXA122 | 2183937 | 2190242 |
| EcXA123 | 3472315 | 3474089 |
| EcXA124 | 3445951 | 3450907 |
| EcXA125 | 4090705 | 4091019 |
| EcXA126 | 3814303 | 3815166 |
| EcXA127a-b | 2989290 | 2989781 |
| EcXA128 | 703167 | 705113 |
| EcXA129 | 149715 | 152854 |
| EcXA130 | 3913181 | 3920080 |
| EcXA131 | 3156944 | 3159162 |
| EcXA132 | 1533961 | 1540614 |
| EcXA133a-c | Same operon as | |
| | EcXA118 | |
| EcXA134 | 3373914 | 3375055 |
| EcXA136a-b | 3031677 | 3037763 |
| EcXA137 | 259612 | 261980 |
| EcXA138 | 3265474 | 3267243 |
| EcXA139a-b | 913181 | 914128 |
| EcXA140a-b | 3848429 | 3850615 |
| EcXA141 | 2099917 | 2106351 |
| EcXA142 | Same operon as | |
| | EcXA118 | |
| EcXA143 | 2985498 | 2986190 |
| EcXA144a-c | 1686600 | 1687775 |
| EcXA145 | 2962383 | 2964059 |
| EcXA146 | 3904481 | 3909153 |
| EcXA147 | 1167423 | 1168133 |
| EcXA148 | 3972208 | 3976217 |
| EcXA149a-b | 3054261 | 3054809 |
| EcXA150 | 3819733 | 3824918 |
| EcXA151 | 3679791 | 3681077 |
| EcXA152 | 2276590 | 2278503 |
| EcXA153 | 4248534 | 4249862 |
| EcXA154 | 2054880 | 2055596 |
| EcXA155 | 2652177 | 2652962 |
| EcXA156 | 4059826 | 4061091 |
| EcXA157 | Same operon as | |
| | EcXA124 | |
| EcXA158 | 2643033 | 2645345 |
| | 2645346 | 2650307 |
| EcXA159 | 506510 | 507304 |
| EcXA160 | 1823979 | 1830006 |
| EcXA161 | 411831 | 416176 |
| EcXA162 | 4490155 | 4491974 |
| EcXA163 | 3882705 | 3884351 |
| EcXA164 | 2350667 | 2354731 |
| EcXA165 | 686062 | 686970 |
| EcXA166 | 4039996 | 4041625 |
| EcXA167 | 2169417 | 2175230 |
| EcXA168 | 1801118 | 1803017 |
| EcXA169 | Same operon as | |
| | EcXA118 | |
| EcXA170 | 381728 | 383159 |
| EcXA171 | 915696 | 917354 |
| EcXA172 | 2461032 | 2462090 |
| EcXA173 | 3623310 | 3628232 |
| EcXA174 | 3088366 | 3089073 |
| EcXA175 | 1935673 | 1937115 |
| EcXA176 | 4346893 | 4349240 |
| EcXA177 | 2493599 | 2494585 |
| EcXA178 | 20815 | 21078 |
| EcXA180 | 4279362 | 4280654 |
| EcXA181 | 4148026 | 4150677 |
| EcXA182 | 3077663 | 3079654 |
| EcXA183 | 89634 | 103153 |
| EcXA184 | 2871410 | 2873442 |
| EcXA185 | 3437253 | 3440108 |
| EcXA186 | 284619 | 287623 |
| EcXA187 | 2383874 | 2384851 |
| EcXA188 | 1168635 | 1169597 |
| EcXA189a-c | 1908189 | 1909673 |
| EcXA190a-b | 3192961 | 3198606 |
| EcXA191a-b | 3920685 | 3924083 |
| EcXA192 | 3930941 | 3935849 |

### Example 5

### Identification of Individual Genes within an Operon Required for Proliferation

[0176] The following example illustrates a method for determining which gene in an operon is required for proliferation. The clone insert corresponding to Molecule No. EcXA119 possesses nucleic acid sequence homology to the E. coli gene b2883. This gene is located in an operon containing the b2882, b2883, b2884, and b2885 genes. To determine which gene or genes in this operon are required for proliferation, each gene is selectively inactivated using homologous recombination. Gene b2885 is the first gene to be inactivated.

[0177] Deletion inactivation of a chromosomal copy of a gene in E. coli can be accomplished by integrative gene replacement. The principle of this method (Hamilton, C. M., et al 1989. J Bacteriol. 171: 4617-4622) is to construct a mutant allele of the targeted gene, introduce that allele into the chromosome using a conditional suicide vector, and then force the removal of the native wild type allele and vector sequences. This will replace the native gene with a desired mutation(s) but leave promoters, operators, etc. intact. Essentiality of a gene is determined either by deduction from genetic analysis or by conditional expression of a wild type copy of the targeted gene (trans complementation).

[0178] The first step is to generate a mutant b2885 allele using PCR amplification. Two sets of PCR primers are chosen to produce a copy of b2885 with a large central deletion to inactivate the gene. In order to eliminate polar effects, it is desirable to construct a mutant allele comprising an in-frame deletion of most or all of the coding region of the b2885 gene. Each set of PCR primers is chosen such that a region flanking the gene to be amplified is sufficiently long to allow recombination (typically at least 500 nucleotides on each side of the deletion). The targeted deletion or mutation will be contained within this fragment. To facilitate cloning of the PCR product, the PCR primers may also contain restriction endonuclease sites found in the cloning region of a conditional knockout vector such as pKO3 (Link, et al 1997 J. Bacteriol. 179 (20): 6228-6237). Suitable sites include NotI, SalI, BamHI and SmaI. The b2885 gene fragments are produced using standard PCR conditions including, but not limited to, those outlined in the manufacturers directions for the Hot Start Taq PCR kit (Qiagen, Inc., Valencia, Calif.). The PCR reactions will produce two fragments that can be fused together. Alternatively, crossover PCR can be used to generate a desired deletion in one step (Ho, S. N., et al 1989. Gene 77: 51-59, Horton, R. M., et al 1989. Gene 77: 61-68). The mutant allele thus produced is called a “null” allele because it cannot produce a functional gene product.

[0179] The mutant allele obtained from PCR amplification is cloned into the multiple cloning site of pKO3. Directional cloning of the b2885 null allele is not necessary. The pKO3 vector has a temperature-sensitive origin of replication derived from pSC101. Therefore, clones are propagated at the permissive temperature of 30° C. The vector also contains two selectable marker genes: one that confers resistance to chloramphenicol and another, the Bacillus subtilis sacB gene, that allows for counter-selection on sucrose containing growth medium. Clones that contain vector DNA with the null allele inserted are confirmed by restriction endonuclease analysis and DNA sequence analysis of isolated plasmid DNA. The plasmid containing the b2885 null allele insert is known as a knockout plasmid.

[0180] Once the knockout plasmid has been constructed and its sequence verified, it is transformed into a Rec⁺ E. coli host cell. Transformation can be by any standard method such as electroporation. In some fraction of the transformed cells, plasmids will integrate into the E. coli chromosome by homologous recombination between the b2885 null allele in the plasmid and the b2885 gene in the chromosome. Transformant colonies in which such an event has occurred are readily selected by growth at the non-permissive temperature of 43° C. and in the presence of choramphenicol. At this temperature, the plasmid will not replicate as an episome and will be lost from cells as they grow and divide. These cells are no longer resistant to chloramphenicol and will not grow when it is present. However, cells in which the knockout plasmid has integrated into the E. coli chromosome remain resistant to chloramphenicol and propagate.

[0181] Cells containing integrated knock-out plasmids are usually the result of a single crossover event that creates a tandem repeat of the mutant and native wild type alleles of b2885 separated by the vector sequences. A consequence of this is that b2885 will still be expressed in these cells. In order to determine if the gene is essential for growth, the wild type copy must be removed. This is accomplished by selecting for plasmid excision, a process in which homologous recombination between the two alleles results in looping out of the plasmid sequences. Cells that have undergone such an excision event and have lost plasmid sequences including sacB gene are selected for by addition of sucrose to the medium. The sacB gene product converts sucrose to a toxic molecule. Thus counter selection with sucrose ensures that plasmid sequences are no longer present in the cell. Loss of plasmid sequences is further confirmed by testing for sensitivity to chloramphenicol (loss of the chloramphenicol resistance gene). The latter test is important because occasionally a mutation in the sacB gene can occur resulting in a loss of sacB function with no effect on plasmid replication (Link, et. al., 1997 J. Bacteriol 179 (20): 6228-6237). These artifact clones retain plasmid sequences and are therefore still resistant to chloramphenicol.

[0182] In the process of plasmid excision, one of the two b2885 alleles is lost from the chromosome along with the plasmid DNA. In general, it is equally likely that the null allele or the wild type allele will be lost. Therefore, if the b2885 gene is not essential, half of the clones obtained in this experiment will have the wild type allele on the chromosome and half will have the null allele. However, if the b2885 gene is essential, cells containing the null allele will not be obtained as a single copy of the null allele would be lethal.

[0183] To determine the essentiality of b2885, a statistically significant number of the resulting clones, at least 20, are analyzed by PCR amplification of the b2885 gene. Since the null allele is missing a significant portion of the b2885 gene, its PCR product is significantly shorter than that of the wild type gene and the two are readily distinguished by gel electrophoretic analysis. The PCR products may also be subjected to sequence determination for further confirmation by methods well known to those in the art.

[0184] The above experiment is generally adequate for determining the essentiality of a gene such as b2885. However, it may be necessary or desirable to more directly confirm the essentiality of the gene. There are several methods by which this can be accomplished. In general, these involve three steps: 1) construction of an episome containing a wild type allele, 2) isolation of clones containing a single chromosomal copy of the mutant null allele as described above but in the presence of the episomal wild type allele, and then 3) determining if the cells survive when the expression of the episomal allele is shut off. In this case, the trans copy of wild type b2885 is made by PCR cloning of the entire coding region of b2885 and inserting it in the sense orientation downstream of an inducible promoter such as the E. coli lac promoter. Transcription of this allele of b2885 will be induced in the presence of IPTG which inactivates the lac repressor. Under IPTG induction b2885 protein will be expressed as long as the recombinant gene also possesses a ribosomal binding site, also known as a “Shine-Dalgarno Sequence”. The trans copy of b2885 is cloned on a plasmid that is compatible with pSC101. Compatible vectors include p15A, pBR322, and the pUC plasmids, among others. Replication of the compatible plasmid will not be temperature-sensitive. The entire process of integrating the null allele of b2885 and subsequent plasmid excision is carried out in the presence of IPTG to ensure the expression of functional b2885 protein is maintained throughout. After the null b2885 allele is confirmed as integrated on the chromosome in place of the wild type b2885 allele, then IPTG is withdrawn and expression of functional b2885 protein shut off. If the b2885 gene is essential, cells will cease to proliferate under these conditions. However, if the b2885 gene is not essential, cells will continue to proliferate under these conditions. In this experiment, essentiality is determined by conditional expression of a wild type copy of the gene rather than inability to obtain the intended chromosomal disruption.

[0185] An advantage of this method over some other gene disruption techniques is that the targeted gene can be deleted or mutated without the introduction of large segments of foreign DNA. Therefore, polar effects on downstream genes are eliminated or minimized. There are methods described to introduce inducible promoters upstream of potential essential bacterial genes. However in such cases, polarity from multiple transcription start points can be a problem. One way of preventing this is to insert a gene disruption cassette that contains strong transcriptional terminators upstream of the integrated inducible promoter (Zhang, Y, and Cronan, J. E. 1996 J Bacteriol. 178 (12): 3614-3620). The described techniques will all be familiar to one of ordinary skill in the art.

[0186] Following the analysis of the b2885 gene, the other genes of the operon are investigated to determine if they are required for proliferation.

### Example 6

### Expression of the Proteins Encoded by Genes Identified as Required for E. coli Proliferation

[0187] The following is provided as one exemplary method to express the proliferation-required proteins encoded by the identified sequences described above. First, the initiation and termination codons for the gene are identified. If desired, methods for improving translation or expression of the protein are well known in the art. For example, if the nucleic acid encoding the polypeptide to be expressed lacks a methionine codon to serve as the initiation site, a strong Shine-Delgamo sequence, or a stop codon, these sequences can be added. Similarly, if the identified nucleic acid sequence lacks a transcription termination signal, this sequence can be added to the construct by, for example, splicing out such a sequence from an appropriate donor sequence. In addition, the coding sequence may be operably linked to a strong promoter or an inducible promoter if desired. The identified nucleic acid sequence or portion thereof encoding the polypeptide to be expressed is obtained by PCR from the bacterial expression vector or genome using oligonucleotide primers complementary to the identified nucleic acid sequence or portion thereof and containing restriction endonuclease sequences for NcoI incorporated into the 5′ primer and BglII at the 5′ end of the corresponding 3′-primer, taking care to ensure that the identified nucleic acid sequence is positioned in frame with the termination signal. The purified fragment obtained from the resulting PCR reaction is digested with NcoI and BglII, purified and ligated to an expression vector.

[0188] The ligated product is transformed into DH5α or some other E. coli strain suitable for the over expression of potential proteins. Transformation protocols are well known in the art. For example, transformation protocols are described in: Current Protocols in Molecular Biology, Vol. 1, Unit 1.8, (Ausubel, et al., Eds.) John Wiley & Sons, Inc. (1997). Positive transformants are selected after growing the transformed cells on plates containing 50-100 μg/ml Ampicillin (Sigma, St. Louis, Mo.). In one embodiment, the expressed protein is held in the cytoplasm of the host organism. In an alternate embodiment, the expressed protein is released into the culture medium. In still another alternative, the expressed protein can be sequestered in the periplasmic space and liberated therefrom using any one of a number of cell lysis techniques known in the art. For example, the osmotic shock cell lysis method described in Chapter 16 of Current Protocols in Molecular Biology, Vol. 2, (Ausubel, et al., Eds.) John Wiley & Sons, Inc. (1997). Each of these procedures can be used to express a proliferation-required protein.

[0189] Expressed proteins, whether in the culture medium or liberated from the periplasmic space or the cytoplasm, are then purified or enriched from the supernatant using conventional techniques such as ammonium sulfate precipitation, standard chromatography, immunoprecipitation, immunochromatography, size exclusion chromatography, ion exchange chromatography, and HPLC. Alternatively, the secreted protein can be in a sufficiently enriched or pure state in the supernatant or growth media of the host to permit it to be used for its intended purpose without further enrichment. The purity of the protein product obtained can be assessed using techniques such as Coomassie or silver staining or using antibodies against the control protein. Coomassie and silver staining techniques are familiar to those skilled in the art.

[0190] Antibodies capable of specifically recognizing the protein of interest can be generated using synthetic peptides using methods well known in the art. See, Antibodies: A Laboratory Manual, (Harlow and Lane, Eds.) Cold Spring Harbor Laboratory (1988). For example, 15-mer peptides having a sequence encoded by the appropriate identified gene sequence of interest or portion thereof can be chemically synthesized. The synthetic peptides are injected into mice to generate antibodies to the polypeptide encoded by the identified nucleic acid sequence of interest or portion thereof. Alternatively, samples of the protein expressed from the expression vectors discussed above can be purified and subjected to amino acid sequencing analysis to confirm the identity of the recombinantly expressed protein and subsequently used to raise antibodies. An Example describing in detail the generation of monoclonal and polyclonal antibodies appears in Example 7.

[0191] The protein encoded by the identified nucleic acid sequence of interest or portion thereof can be purified using standard immunochromatography techniques. In such procedures, a solution containing the secreted protein, such as the culture medium or a cell extract, is applied to a column having antibodies against the secreted protein attached to the chromatography matrix. The secreted protein is allowed to bind the immunochromatography column. Thereafter, the column is washed to remove non-specifically bound proteins. The specifically bound secreted protein is then released from the column and recovered using standard techniques. These procedures are well known in the art.

[0192] In an alternative protein purification scheme, the identified nucleic acid sequence of interest or portion thereof can be incorporated into expression vectors designed for use in purification schemes employing chimeric polypeptides. In such strategies the coding sequence of the identified nucleic acid sequence of interest or portion thereof is inserted in-frame with the gene encoding the other half of the chimera. The other half of the chimera can be maltose binding protein (MBP) or a nickel binding polypeptide encoding sequence. A chromatography matrix having antibody to MBP or nickel attached thereto is then used to purify the chimeric protein. Protease cleavage sites can be engineered between the MBP gene or the nickel binding polypeptide and the identified expected gene of interest, or portion thereof. Thus, the two polypeptides of the chimera can be separated from one another by protease digestion.

[0193] One useful expression vector for generating maltose binding protein fusion proteins is pMAL (New England Biolabs), which encodes the malE gene. In the pMal protein fusion system, the cloned gene is inserted into a pMal vector downstream from the malE gene. This results in the expression of an MBP-fusion protein. The fusion protein is purified by affinity chromatography. These techniques as described are well known to those skilled in the art of molecular biology.

### Example 7

### Production of an Antibody to an isolated E. coli Protein

[0194] Substantially pure protein or polypeptide is isolated from the transformed cells as described in Example 6. The concentration of protein in the final preparation is adjusted, for example, by concentration on a 10,000 molecular weight cut off AMICON filter device (Millipore, Bedford, Mass.), to the level of a few micrograms/ml. Monoclonal or polyclonal antibody to the protein can then be prepared as follows:

[0195] Monoclonal Antibody Production by Hybridoma Fusion

[0196] Monoclonal antibody to epitopes of any of the peptides identified and isolated as described can be prepared from murine hybridomas according to the classical method of Kohler, G. and Milstein, C., Nature 256:495 (1975) or any of the well-known derivative methods thereof. Briefly, a mouse is repetitively inoculated with a few micrograms of the selected protein or peptides derived therefrom over a period of a few weeks. The mouse is then sacrificed, and the antibody producing cells of the spleen isolated. The spleen cells are fused by means of polyethylene glycol with mouse myeloma cells, and the excess unfused cells destroyed by growth of the system on selective media comprising aminopterin (HAT media). The successfully fused cells are diluted and aliquots of the dilution placed in wells of a microtiter plate where growth of the culture is continued. Antibody-producing clones are identified by detection of antibody in the supernatant fluid of the wells by immunoassay procedures, such as ELISA, as described by Engvall, E., “Enzyme immunoassay ELISA and EMIT,” Meth. Enzymol. 70:419 (1980), and derivative methods thereof. Selected positive clones can be expanded and their monoclonal antibody product harvested for use. Detailed procedures for monoclonal antibody production are described in Davis, L. et al. Basic Methods in Molecular Biology Elsevier, New York. Section 21-2.

[0197] Polyclonal Antibody Production by Immunization

[0198] Polyclonal antiserum containing antibodies to heterogeneous epitopes of a single protein or a peptide can be prepared by immunizing suitable animals with the expressed protein or peptides derived therefrom described above, which can be unmodified or modified to enhance immunogenicity. Effective polyclonal antibody production is affected by many factors related both to the antigen and the host species. For example, small molecules tend to be less immunogenic than larger molecules and can require the use of carriers and adjuvant. Also, host animals vary in response to site of inoculations and dose, with both inadequate or excessive doses of antigen resulting in low titer antisera. Small doses (ng level) of antigen administered at multiple intradermal sites appears to be most reliable. An effective immunization protocol for rabbits can be found in Vaitukaitis, J. et al. J. Clin. Endocrinol. Metab. 33:988-991 (1971).

[0199] Booster injections can be given at regular intervals, and antiserum harvested when antibody titer thereof, as determined semi-quantitatively, for example, by double immunodiffusion in agar against known concentrations of the antigen, begins to fall. See, for example, Ouchterlony, O. et al., Chap. 19 in: Handbook of Experimental Immunology D. Wier (ed) Blackwell (1973). Plateau concentration of antibody is usually in the range of 0.1 to 0.2 mg/ml of serum (about 12 μM). Affinity of the antisera for the antigen is determined by preparing competitive binding curves, as described, for example, by Fisher, D., Chap. 42 in: Manual of Clinical Immunology, 2d Ed. (Rose and Friedman, Eds.) Amer. Soc. For Microbiol., Washington, D.C. (1980).

[0200] Antibody preparations prepared according to either protocol are useful in quantitative immunoassays which determine concentrations of antigen-bearing substances in biological samples; they are also used semi-quantitatively or qualitatively to identify the presence of antigen in a biological sample. The antibodies can also be used in therapeutic compositions for killing bacterial cells expressing the protein.

### Example 8

### Screening Chemical Libraries

[0201] A. Protein-Based Assays

[0202] Having isolated and expressed bacterial proteins shown to be required for bacterial proliferation, the present invention further contemplates the use of these expressed proteins in assays to screen libraries of compounds for potential drug candidates. The generation of chemical libraries is well known in the art. For example combinatorial chemistry can be used to generate a library of compounds to be screened in the assays described herein. A combinatorial chemical library is a collection of diverse chemical compounds generated by either chemical synthesis or biological synthesis by combining a number of chemical “building blocks” reagents. For example, a linear combinatorial chemical library such as a polypeptide library is formed by combining amino acids in every possible combination to yield peptides of a given length. Millions of chemical compounds theoretically can be synthesized through such combinatorial use of chemical building blocks. For example, one commentator observed that the systematic, combinatorial mixing of 100 interchangeable chemical building blocks results in the theoretical synthesis of 100 million tetrameric compounds or 10 billion pentameric compounds. (Gallop et al., “Applications of Combinatorial Technologies to Drug Discovery, Background and Peptide Combinatorial Libraries,” Journal of Medicinal Chemistry, Vol. 37, No. 9, 1233-1250 (1994). Other chemical libraries known to those in the art may also be used, including natural product libraries.

[0203] Once generated, combinatorial libraries can be screened for compounds that possess desirable biological properties. For example, compounds which may be useful as drugs or to develop drugs would likely have the ability to bind to the target protein identified, expressed and purified as discussed above. Further, if the identified target protein is an enzyme, candidate compounds would likely interfere with the enzymatic properties of the target protein. Any enzyme can be a target protein. For example, the enzymatic function of a target protein can be to serve as a protease, nuclease, phosphatase, dehydrogenase, transporter protein, transcriptional enzyme, and any other type of enzyme known or unknown. Thus, the present invention contemplates using the protein products described above to screen combinatorial and other chemical libraries.

[0204] Those in the art will appreciate that a number of techniques exist for characterizing target proteins in order to identify molecules useful for the discovery and development of therapeutics. For example, some techniques involve the generation and use of small peptides to probe and analyze target proteins both biochemically and genetically in order to identify and develop drug leads. Such techniques include the methods described in PCT publications No. WO9935494, WO9819162, WO9954728, the disclosures of which are incorporated herein by reference in their entireties.

[0205] In another example, the target protein is a serine protease and the substrate of the enzyme is known. The present example is directed towards the analysis of libraries of compounds to identify compounds that function as inhibitors of the target enzyme. First, a library of small molecules is generated using methods of combinatorial library formation well known in the art. U.S. Pat. Nos. 5,463,564 and 5,574, 656, to Agrafiotis, et al., entitled “System and Method of Automatically Generating Chemical Compound with Desired Properties,” the disclsoures of which are incorporated herein by reference in their entireties, are two such teachings. Then the library compounds are screened to identify library compounds that possess desired structural and functional properties. U.S. Pat. No. 5,684,711, the disclosure of which is incorporated herein by reference in its entirety, also discusses a method for screening libraries.

[0206] To illustrate the screening process, the combined target and chemical compounds of the library are exposed to and permitted to interact with the purified enzyme. A labeled substrate is added to the incubation. The label on the substrate is such that a detectable signal is emitted from metabolized substrate molecules. The emission of this signal permits one to measure the effect of the combinatorial library compounds on the enzymatic activity of target enzymes. The characteristics of each library compound is encoded so that compounds demonstrating activity against the enzyme can be analyzed and features common to the various compounds identified can be isolated and combined into future iterations of libraries.

[0207] Once a library of compounds is screened, subsequent libraries are generated using those chemical building blocks that possess the features shown in the first round of screen to have activity against the target enzyme. Using this method, subsequent iterations of candidate compounds will possess more and more of those structural and functional features required to inhibit the function of the target enzyme, until a group of enzyme inhibitors with high specificity for the enzyme can be found. These compounds can then be further tested for their safety and efficacy as antibiotics for use in mammals.

[0208] It will be readily appreciated that this particular screening methodology is exemplary only. Other methods are well known to those skilled in the art. For example, a wide variety of screening techniques are known for a large number of naturally-occurring targets when the biochemical function of the target protein is known.

[0209] B. Cell-based Assays

[0210] Current cell-based assays used to identify or to characterize compounds for drug discovery and development frequently depend on detecting the ability of a test compound to inhibit the activity of a target molecule located within a cell or located on the surface of a cell. An advantage of cell-based assays is that they allow the effect of a compound on a target molecule's activity to be detected within the physiologically relevant environment of the cell as opposed to an in vitro environment. Most often such target molecules are proteins such as enzymes, receptors and the like. However, target molecules may also include other molecules such as DNAs, lipids, carbohydrates and RNAs including messenger RNAs, ribosomal RNAs, tRNAs and the like. A number of highly sensitive cell-based assay methods are available to those of skill in the art to detect binding and interaction of test compounds with specific target molecules. However, these methods are generally not highly effective when the test compound binds to or otherwise interacts with its target molecule with moderate or low affinity. In addition, the target molecule may not be readily accessible to a test compound in solution, such as when the target molecule is located inside the cell or within a cellular compartment such as the periplasm of a bacterial cell. Thus, current cell-based assay methods are limited in that they are not effective in identifying or characterizing compounds that interact with their targets with moderate to low affinity or compounds that interact with targets that are not readily accessible.

[0211] Cell-based assay methods of the present invention have substantial advantages over current cell-based assays practiced in the art. These advantages derive from the use of sensitized cells in which the level or activity of a proliferation-required gene product (the target molecule) has been specifically reduced to the point where the presence or absence of its function becomes a rate-determining step for cellular proliferation. Bacterial, fungal, plant, or animal cells can all be used with the present method. Such sensitized cells become much more sensitive to compounds that are active against the affected target molecule. Thus, cell-based assays of the present invention are capable of detecting compounds exhibiting low or moderate potency against the target molecule of interest because such compounds are substantially more potent on sensitized cells than on non-sensitized cells. The affect may be such that a test compound may be two to several times more potent, at least 10 times more potent, at least 20 times more potent, at least 50 times more potent, at least 100 times more potent, at least 1000 times more potent, or even more than 1000 times more potent when tested on the sensitized cells as compared to the non-sensitized cells.

[0212] Due in part to the increased appearance of antibiotic resistance in pathogenic microorganisms and to the significant side-effects associated with some currently used antibiotics, novel antibiotics acting at new targets are highly sought after in the art. Yet, another limitation in the current art related to cell-based assays is the problem of identifying hits against the same kinds of target molecules in the same limited set of biological pathways over and over again. This may occur when compounds acting at such new targets are discarded, ignored or fail to be detected because compounds acting at the “old” targets are encountered more frequently and are more potent than compounds acting at the new targets. As a result, the majority of antibiotics in use currently interact with a relatively small number of target molecules within an even more limited set of biological pathways.

[0213] The use of sensitized cells of the current invention provides a solution to the above problem in two ways. First, desired compounds acting at a target of interest, whether a new target or a previously known but poorly exploited target, can now be detected above the “noise” of compounds acting at the “old” targets due to the specific and substantial increase in potency of such desired compounds when tested on the sensitized cells of the current invention. Second, the methods used to sensitize cells to compounds acting at a target of interest may also sensitize these cells to compounds acting at other target molecules within the same biological pathway. For example, expression of an antisense molecule to a gene encoding a ribosomal protein is expected to sensitize the cell to compounds acting at that ribosomal protein and may also sensitize the cells to compounds acting at any of the ribosomal components (proteins or rRNA) or even to compounds acting at any target which is part of the protein synthesis pathway. Thus an important advantage of the present invention is the ability to reveal new targets and pathways that were previously not readily accessible to drug discovery methods.

[0214] Sensitized cells of the present invention are prepared by reducing the activity or level of a target molecule. The target molecule may be a gene product, such as an RNA or polypeptide produced from the proliferation-required nucleic acids described herein. Alternatively, the target may be a gene product such as an RNA or polypeptide which is produced from a sequence within the same operon as the proliferation-required nucleic acids described herein. In addition, the target may be an RNA or polypeptide in the same biological pathway as the proliferation-required nucleic acids described herein. Such biological pathways include, but are not limited to, enzymatic, biochemical and metabolic pathways as well as pathways involved in the production of cellular structures such the cell wall.

[0215] Current methods employed in the arts of medicinal and combinatorial chemistries are able to make use of structure-activity relationship information derived from testing compounds in various biological assays including direct binding assays and cell-based assays. Occasionally compounds are directly identified in such assays that are sufficiently potent to be developed as drugs. More often, initial hit compounds exhibit moderate or low potency. Once a hit compound is identified with low or moderate potency, directed libraries of compounds are synthesized and tested in order to identify more potent leads. Generally these directed libraries are combinatorial chemical libraries consisting of compounds with structures related to the hit compound but containing systematic variations including additions, subtractions and substitutions of various structural features. When tested for activity against the target molecule, structural features are identified that either alone or in combination with other features enhance or reduce activity. This information is used to design subsequent directed libraries containing compounds with enhanced activity against the target molecule. After one or several iterations of this process, compounds with substantially increased activity against the target molecule are identified and may be further developed as drugs. This process is facilitated by use of the sensitized cells of the present invention since compounds acting at the selected targets exhibit increased potency in such cell-based assays, thus; more compounds can now be characterized providing more useful information than would be obtained otherwise.

[0216] Thus, it is now possible using cell-based assays of the present invention to identify or characterize compounds that previously would not have been readily identified or characterized including compounds that act at targets that previously were not readily exploited using cell-based assays. The process of evolving potent drug leads from initial hit compounds is also substantially improved by the cell-based assays of the present invention because, for the same number of test compounds, more structure-function relationship information is likely to be revealed.

[0217] The method of sensitizing a cell entails selecting a suitable gene or operon. A suitable gene or operon is one whose expression is required for the proliferation of the cell to be sensitized. The next step is to introduce into the cells to be sensitized, an antisense RNA capable of hybridizing to the suitable gene or operon or to the RNA encoded by the suitable gene or operon. Introduction of the antisense RNA can be in the form of an expression vector in which antisense RNA is produced under the control of an inducible promoter. The amount of antisense RNA produced is limited by varying the inducer concentration to which the cell is exposed and thereby varying the activity of the promoter driving transcription of the antisense RNA. Thus, cells are sensitized by exposing them to an inducer concentration that results in a sub-lethal level of antisense RNA expression.

[0218] In one embodiment of the cell-based assays, the identified exogenous E. coli nucleotide sequences of the present invention are used to inhibit the production of a proliferation-required protein. Expression vectors producing antisense RNA complementary to identified genes required for proliferation are used to limit the concentration of a proliferation-required protein without severely inhibiting growth. To achieve that goal, a growth inhibition dose curve of inducer is calculated by plotting various doses of inducer against the corresponding growth inhibition caused by the antisense expression. From this curve, various percentages of antisense induced growth inhibition, from 1 to 100% can be determined. If the promoter contained in the expression vector contains a lac operator the transcription is regulated by lac repressor and expression from the promoer is inducible with IPTG. For example, the highest concentration of the inducer IPTG that does not reduce the growth rate significantly (0% growth inhibition) can be predicted from the curve. Cellular proliferation can be monitored by growth medium turbidity via OD measurements. In another example, the concentration of inducer that reduces growth by 25% can be predicted from the curve. In still another example, a concentration of inducer that reduces growth by 50% can be calculated. Additional parameters such as colony forming units (cfu) can be used to measure cellular viability.

[0219] Cells to be assayed are exposed to the above-determined concentrations of inducer. The presence of the inducer at this sub-lethal concentration reduces the amount of the proliferation required gene product to a low amount in the cell that will limit but not prevent growth. Cells grown in the presence of this concentration of inducer are therefore specifically more sensitive to inhibitors of the proliferation-required protein or RNA of interest or to inhibitors of proteins or RNAs in the same biological pathway as the proliferation-required protein or RNA of interest but not to inhibitors of unrelated proteins or RNAs.

[0220] Cells pretreated with sub-inhibitory concentrations of inducer and thus containing a reduced amount of proliferation-required target gene product are then used to screen for compounds that reduce cell growth. The sub-lethal concentration of inducer may be any concentration consistent with the intended use of the assay to identify candidate compounds to which the cells are more sensitive. For example, the sub-lethal concentration of the inducer may be such that growth inhibition is at least about 5%, at least about 8%, at least about 10%, at least about 20%, at least about 30%, at least about 40%, at least about 50%, at least about 60% at least about 75%, 90%, 95% or more. Cells which are pre-sensitized using the preceding method are more sensitive to inhibitors of the target protein because these cells contain less target protein to be inhibited than do wild-type cells.

[0221] In another embodiment of the cell-based assays of the present invention, the level or activity of a proliferation required gene product is reduced using a mutation, such as a temperature sensitive mutation, in the proliferation-required sequence and an antisense nucleic acid complementary to the proliferation-required sequence. Growing the cells at an intermediate temperature between the permissive and restrictive temperatures of the temperature sensitive mutant where the mutation is in a proliferation-required gene produces cells with reduced activity of the proliferation-required gene product. The antisense RNA complementary to the proliferation-required sequence further reduces the activity of the proliferation required gene product. Drugs that may not have been found using either the temperature sensitive mutation or the antisense nucleic acid alone may be identified by determining whether cells in which expression of the antisense nucleic acid has been induced and which are grown at a temperature between the permissive temperature and the restrictive temperature are substantially more sensitive to a test compound than cells in which expression of the antisense nucleic acid has not been induced and which are grown at a permissive temperature. Also drugs found previously from either the antisense nucleic acid alone or the temperature sensitive mutation alone may have a different sensitivity profile when used in cells combining the two approaches, and that sensitivity profile may indicate a more specific action of the drug in inhibiting one or more activities of the gene product.

[0222] Temperature sensitive mutations may be located at different sites within the gene and correspond to different domains of the protein. For example, the dnaB gene of Escherichia coli encodes the replication fork DNA helicase. DnaB has several domains, including domains for oligomerization, ATP hydrolysis, DNA binding, interaction with primase, interaction with DnaC, and interaction with DnaA [(Biswas, E. E. and Biswas, S. B. 1999 Mechanism and DnaB helicase of Escherichia coli: structural domains involved in ATP hydrolysis, DNA binding, and oligomerization. Biochem. 38:10919-10928; Hiasa, H. and Marians, K. J. 1999 Initiation of bidirectional replication at the chromosomal origin is directed by the interaction between helicase and primase. J. Biol. Chem. 274:27244-27248; San Martin, C., Radermacher, M., Wolpensinger, B., Engel, A., Miles, C. S., Dixon, N. E., and Carazo, J. M. 1998 Three-dimensional reconstructions from cryoelectron microscopy images reveal an intimate complex between helicase DnaB and its loading partner DnaC. Structure 6:501-9; Sutton, M. D., Carr, K. M., Vicente, M., and Kaguni, J. M. 1998 Escherichia coli DnaA protein. The N-terminal domain and loading of DnaB helicase at the E. coli chromosomal. J. Biol. Chem. 273:34255-62), the disclosures of which are incorporated herein by reference in their entireties]. Temperature sensitive mutations in different domains of DnaB confer different phenotypes at the restrictive temperature, which include either an abrupt stop or slow stop in DNA replication with or without DNA breakdown (Wechsler, J. A. and Gross, J. D. 1971. Escherichia coli mutants temperature-sensitive for DNA synthesis. Mol. Gen. Genetics 113:273-284, the disclosure of which is incorporated herein by reference in its entirety) and termination of growth or cell death. Combining the use of temperature sensitive mutations in the dnaB gene that cause cell death at the restrictive temperature with an antisense to the dnaB gene could lead to the discovery of very specific and effective inhibitors of one or a subset of activities exhibited by DnaB.

[0223] It will be appreciated that the above method may be performed with any mutation which reduces but does not eliminate the activity or level of the gene product which is required for proliferation.

[0224] When screening for antimicrobial agents against a gene product required for proliferation, growth inhibition of cells containing a limiting amount of that proliferation-required gene product can be assayed. Growth inhibition can be measured by directly comparing the amount of growth, measured by the optical density of the growth medium, between an experimental sample and a control sample. Alternative methods for assaying cell proliferation include measuring green fluorescent protein (GFP) reporter construct emissions, various enzymatic activity assays, and other methods well known in the art.

[0225] It will be appreciated that the above method may be performed in solid phase, liquid phase or a combination of the two. For example, cells grown on nutrient agar containing the inducer of the antisense construct may be exposed to compounds spotted onto the agar surface. A compound's effect may be judged from the diameter of the resulting killing zone, the area around the compound application point in which cells do not grow. Multiple compounds may be transferred to agar plates and simultaneously tested using automated and semi-automated equipment including but not restricted to multi-channel pipettes (for example the Beckman Multimek) and multi-channel spotters (for example the Genomic Solutions Flexys). In this way multiple plates and thousands to millions of compounds may be tested per day.

[0226] The compounds may also be tested entirely in liquid phase using microtiter plates as described below. Liquid phase screening may be performed in microtiter plates containing 96, 384, 1536 or more wells per microtiter plate to screen multiple plates and thousands to millions of compounds per day. Automated and semi-automated equipment may be used for addition of reagents (for example cells and compounds) and determination of cell density.

### Example 9

### Cell-based Assay Using Antisense Complementary to Genes Encoding Ribosomal Proteins

[0227] The effectiveness of the above cell-based assay was validated using constructs expressing antisense RNA to the proliferation required E. coli genes rplL, rplJ, and rplW encoding ribosomal proteins L7/L12, L10 and L23 respectively. These proteins are part of the protein synthesis apparatus of the cell and as such are required for proliferation. These constructs were used to test the effect of antisense expression on cell sensitivity to antibiotics known to bind to the ribosome and thereby inhibit protein synthesis. Constructs expressing antisense RNA to several other genes (elaD, visC, yohH, and atpE/B), the products of which are not involved in protein synthesis were used for comparison.

[0228] First, pLEX5BA (Krause et al., J. Mol. Biol. 274: 365 (1997), the disclosure of which is incorporated herein by reference in its entirety) expression vectors containing antisense constructs to either rplW or to elaD were introduced into separate E. coli cell populations. Vector introduction is a technique well known to those of ordinary skill in the art. The expression vectors of this example contain IPTG inducible promoters that drive the expression of the antisense RNA in the presence of the inducer. However, those skilled in the art will appreciate that other inducible promoters may also be used. Suitable expression vectors are also well known in the art. The E. coli antisense clones to genes encoding ribosomal proteins L7/L12, L10 and L23 were used to test the effect of antisense expression on cell sensitivity to the antibiotics known to bind to these proteins. Expression vectors containing antisense to either the genes encoding L7/L12 and L10 or L23 were introduced into separate E. coli cell populations.

[0229] The cell populations were exposed to a range of IPTG concentrations in liquid medium to obtain the growth inhibitory dose curve for each clone (FIG. 1). First, seed cultures were grown to a particular turbidity that is measured by the optical density (OD) of the growth solution. The OD of the solution is directly related to the number of bacterial cells contained therein. Subsequently, sixteen 200 ul liquid medium cultures were grown in a 96 well microtiter plate at 37° C. with a range of IPTG concentrations in duplicate two-fold serial dilutions from 1600 uM to 12.5 uM (final concentration). Additionally, control cells were grown in duplicate without IPTG. These cultures were started from equal amounts of cells derived from the same initial seed culture of a clone of interest. The cells were grown for up to 15 hours and the extent of growth was determined by measuring the optical density of the cultures at 600 nm. When the control culture reached mid-log phase the percent growth (relative to the control culture) for each of the IPTG containing cultures was plotted against the log concentrations of IPTG to produce a growth inhibitory dose response curve for the IPTG. The concentration of IPTG that inhibits cell growth to 50% (IC₅₀) as compared to the 0 mM IPTG control (0% growth inhibition) was then calculated from the curve. Under these conditions, an amount of antisense RNA was produced that reduced the expression levels of rplW and elaD to a degree such that growth was inhibited by 50%.

[0230] Alternative methods of measuring growth are also contemplated. Examples of these methods include measurements of proteins, the expression of which is engineered into the cells being tested and can readily be measured. Examples of such proteins include green fluorescent protein (GFP) and various enzymes.

[0231] Cells were pretreated with the selected concentration of IPTG and then used to test the sensitivity of cell populations to tetracycline, erythromycin and other protein synthesis inhibitors. FIG. 2 is an IPTG dose response curve in E. coli transformed with an IPTG-inducible plasmid containing either an antisense clone to the E. coli rplW gene (AS-rplW) which encodes ribosomal protein L23 which is required for protein synthesis and essential for cell proliferation, or an antisense clone to the elaD (AS-elaD) gene which is not known to be involved in protein synthesis and which is also essential for proliferation.

[0232] An example of a tetracycline dose response curve is shown in FIGS. 2A and 2B for the rplW and elaD genes, respectively. Cells were grown to log phase and then diluted into media alone or media containing IPTG at concentrations which give 20% and 50% growth inhibition as determined by IPTG dose response curves. After 2.5 hours, the cells were diluted to a final OD₆₀₀ of 0.002 into 96 well plates containing (1) +/−IPTG at the same concentrations used for the 2.5 hour pre-incubation; and (2) serial two-fold dilutions of tetracycline such that the final concentrations of tetracycline range from 1 μg/ml to 15.6 ng/ml and 0 μg/ml. The 96 well plates were incubated at 37° C. and the OD₆₀₀ was read by a plate reader every 5 minutes for up to 15 hours. For each IPTG concentration and the no IPTG control, tetracycline dose response curves were determined when the control (absence of tetracycline) reached 0.1 OD₆₀₀. To compare tetracycline sensitivity with and without IPTG, tetracycline IC₅₀ₛ were determined from the dose response curves (FIGS. 3A-B). Cells with reduced levels of L23 (AS-rplW) showed increased sensitivity to tetracycline (FIG. 2A) as compared to cells with reduced levels of the elaD gene product (AS-elaD) (FIG. 2B). FIG. 3 shows a summary bar chart in which the ratios of tetracycline IC₅₀ₛ determined in the presence of IPTG which gives 50% growth inhibition versus tetracycline IC₅₀ₛ determined without IPTG (fold increase in tetracycline sensitivity) were plotted. Cells with reduced levels of either L7/L12 (encoded by genes rplL, rplJ) or L23 (encoded by the rplW gene) showed increased sensitivity to tetracycline (FIG. 3). Cells expressing antisense to genes not known to be involved in protein synthesis (AS-atpB/E, AS-visC, AS-elaD, AS-yohH) did not show the same increased sensitivity to tetracycline, validating the specificity of this assay (FIG. 3).

[0233] In addition to the above, it has been observed in initial experiments that clones expressing antisense RNA to genes involved in protein synthesis (including genes encoding ribosomal proteins L7/L12 & L10, L7/L12 alone, L22, and L18, as well as genes encoding rRNA and Elongation Factor G) have increased sensitivity to the macrolide, erythromycin, whereas clones expressing antisense to the non-protein synthesis genes elaD, atpB/E and visC do not. Furthermore, the clone expressing antisense to rplL and rplJ does not show increased sensitivity to nalidixic acid and ofloxacin, antibiotics which do not inhibit protein synthesis.

[0234] The results with the ribosomal protein genes rplL, rplJ, and rplW as well as the initial results using various other antisense clones and antibiotics show that limiting the concentration of an antibiotic target makes cells more sensitive to the antimicrobial agents that specifically interact with that protein. The results also show that these cells are sensitized to antimicrobial agents that inhibit the overall function in which the protein target is involved but are not sensitized to antimicrobial agents that inhibit other functions.

[0235] The cell-based assay described above may also be used to identify the biological pathway in which a proliferation-required nucleic acid or its gene product lies. In such methods, cells expressing a sub-lethal level of antisense to a target proliferation-required nucleic acid and control cells in which expression of the antisense has not been induced are contacted with a panel of antibiotics known to act in various pathways. If the antibiotic acts in the pathway in which the target proliferation-required nucleic acid or its gene product lies, cells in which expression of the antisense has been induced will be more sensitive to the antibiotic than cells in which expression of the antisense has not been induced.

[0236] As a control, the results of the assay may be confirmed by contacting a panel of cells expressing antisense nucleic acids to many different proliferation-required genes including the target proliferation-required gene. If the antibiotic is acting specifically, heightened sensitivity to the antibiotic will be observed only in the cells expressing antisense to a target proliferation-required gene (or cells expressing antisense to other proliferation-required genes in the same pathway as the target proliferation-required gene) but will not be observed generally in all cells expressing antisense to proliferation-required genes.

[0237] Similarly, the above method may be used to determine the pathway on which a test compound, such as a test antibiotic acts. A panel of cells, each of which expresses antisense to a proliferation-required nucleic acid in a known pathway, is contacted with a compound for which it is desired to determine the pathway on which it acts. The sensitivity of the panel of cells to the test compound is determined in cells in which expression of the antisense has been induced and in control cells in which expression of the antisense has not been induced. If the test compound acts on the pathway on which an antisense nucleic acid acts, cells in which expression of the antisense has been induced will be more sensitive to the compound than cells in which expression of the antisense has not been induced. In addition, control cells in which expression of antisense to proliferation-required genes in other pathways has been induced will not exhibit heightened sensitivity to the compound. In this way, the pathway on which the test compound acts may be determined.

[0238] The Example below provides one method for performing such assays.

### Example 10

### Identification of the Pathway in which a Proliferation-Required Gene Lies or the Pathway on which an Antibiotic Acts

[0239] A. Preparation of Bacterial Stocks for Assay

[0240] To provide a consistent source of cells to screen, frozen stocks of host bacteria containing the desired antisense construct are prepared using standard microbiological techniques. For example, a single clone of the organism can be isolated by streaking out a sample of the original stock onto an agar plate containing nutrients for cell growth and an antibiotic for which the antisense construct contains a gene which confers resistance. After overnight growth an isolated colony is picked from the plate with a sterile needle and transferred to an appropriate liquid growth media containing the antibiotic required for maintenance of the plasmid. The cells are incubated at 30° C. to 37° C. with vigorous shaking for 4 to 6 hours to yield a culture in exponential growth. Sterile glycerol is added to 15% (volume to volume) and 100 μL to 500 μL aliquots are distributed into sterile cryotubes, snap frozen in liquid nitrogen, and stored at −80° C. for future assays.

[0241] B. Growth of Bacteria for Use in the Assay

[0242] A day prior to an assay, a stock vial is removed from the freezer, rapidly thawed (37° C. water bath) and a loop of culture is streaked out on an agar plate containing nutrients for cell growth and an antibiotic to which the antisense construct confers resistance. After overnight growth at 37° C., ten randomly chosen, isolated colonies are transferred from the plate (sterile inoculum loop) to a sterile tube containing 5 mL of LB medium containing the antibiotic to which the antisense vector confers resistance. After vigorous mixing to form a homogeneous cell suspension, the optical density of the suspension is measured at 600 nm (OD₆₀₀) and if necessary an aliquot of the suspension is diluted into a second tube of 5 mL, sterile, LB medium plus antibiotic to achieve an OD₆₀₀≦0.02 absorbance units. The culture is then incubated at 37° C. for 1-2 hrs with shaking until the OD₆₀₀ reaches OD 0.2-0.3. At this point the cells are ready to be used in the assay.

[0243] C. Selection of Media to be Used in Assay

[0244] Two fold dilution series of the inducer are generated in culture media containing the appropriate antibiotic for maintenance of the antisense construct. Several media are tested side by side and three to four wells are used to evaluate the effects of the inducer at each concentration in each media. For example, M9 minimal media, LB broth, TBD broth and Muller-Hinton media may be tested with the inducer IPTG at the following concentrations, 50 μM, 100 μM, 200 μM, 400 μM, 600 μM, 800 μM and 1000 μM. Equal volumes of test media-inducer and cells are added to the wells of a 384 well microtiter plate and mixed. The cells are prepared as described above and diluted 1:100 in the appropriate media containing the test antibiotic immediately prior to addition to the microtiter plate wells. For a control, cells are also added to several wells of each media that do not contain inducer, for example 0 μM IPTG. Cell growth is monitored continuously by incubation at 37° C. in a microtiter plate reader monitoring the OD₆₀₀ of the wells over an 18-hour period. The percent inhibition of growth produced by each concentration of inducer is calculated by comparing the rates of logarithmic growth against that exhibited by cells growing in media without inducer. The medium yielding greatest sensitivity to inducer is selected for use in the assays described below.

[0245] D. Measurement of Test Antibiotic Sensitivity in the Absence of Antisense Construct Induction

[0246] Two-fold dilution series of antibiotics with a known mechanism of action are generated in the culture media selected for further assay development that has been supplemented with the antibiotic used to maintain the construct. A panel of test antibiotics known to act on different pathways is tested side by side with three to four wells being used to evaluate the effect of a test antibiotic on cell growth at each concentration. Equal volumes of test antibiotic and cells are added to the wells of a 384 well microtiter plate and mixed. Cells are prepared as described above using the media selected for assay development supplemented with the antibiotic required to maintain the antisense construct and are diluted 1:100 in identical media immediately prior to addition to the microtiter plate wells. For a control, cells are also added to several wells that contain the solvent used to dissolve the antibiotics but no antibiotic. Cell growth is monitored continuously by incubation at 37° C. in a microtiter plate reader monitoring the OD₆₀₀ of the wells over an 18-hour period. The percent inhibition of growth produced by each concentration of antibiotic is calculated by comparing the rates of logarithmic growth against that exhibited by cells growing in media without antibiotic. A plot of percent inhibition against log[antibiotic concentration] allows extrapolation of an IC₅₀ value for each antibiotic.

[0247] E. Measurement of Test Antibiotic Sensitivity in the Presence of Antisense Construct Inducer

[0248] The culture media selected for use in the assay is supplemented with inducer at concentrations shown to inhibit cell growth by 50% and 80% as described above and the antibiotic used to maintain the construct. Two fold dilution series of the panel of test antibiotics used above are generated in each of these media. Several antibiotics are tested side by side with three to four wells being used to evaluate the effects of an antibiotic on cell growth at each concentration, in each media. Equal volumes of test antibiotic and cells are added to the wells of a 384 well microtiter plate and mixed. Cells are prepared as described above using the media selected for use in the assay supplemented with the antibiotic required to maintain the antisense construct. The cells are diluted 1:100 into two 50 mL aliquots of identical media containing concentrations of inducer that have been shown to inhibit cell growth by 50% and 80% respectively and incubated at 37° C. with shaking for 2.5 hours. Immediately prior to addition to the microtiter plate wells, the cultures are adjusted to an appropriate OD₆₀₀ (typically 0.002) by dilution into warm (37° C.) sterile media supplemented with identical concentrations of the inducer and antibiotic used to maintain the antisense construct. For a control, cells are also added to several wells that contain solvent used to dissolve test antibiotics but which contain no antibiotic. Cell growth is monitored continuously by incubation at 37° C. in a microtiter plate reader monitoring the OD₆₀₀ of the wells over an 18-hour period. The percent inhibition of growth produced by each concentration of antibiotic is calculated by comparing the rates of logarithmic growth against that exhibited by cells growing in media without antibiotic. A plot of percent inhibition against log[antibiotic concentration] allows extrapolation of an IC₅₀ value for each antibiotic.

[0249] F. Determining the Specificity of the Test Antibiotics

[0250] A comparison of the IC₅₀s generated by antibiotics of known mechanism of action under antisense induced and non-induced conditions allows the pathway in which a proliferation-required nucleic acid lies to be identified. If cells expressing an antisense nucleic acid against a proliferation-required gene are selectively sensitive to an antibiotic acting via a particular pathway, then the gene against which the antisense acts is involved in the pathway in which the antibiotic acts.

[0251] G. Identification of Pathway in which a Test Antibiotic Acts

[0252] As discussed above, the cell-based assay may also be used to determine the pathway against which a test antibiotic acts. In such an analysis, the pathways against which each member of a panel of antisense nucleic acids acts are identified as described above. A panel of cells, each containing an inducible nucleic acid complementary to a gene in a known proliferation-required pathway, is contacted with a test antibiotic for which it is desired to determine the pathway on which it acts under inducing an non-inducing conditions. If heightened sensitivity is observed in induced cells expressing antisense complementary to a gene in a particular pathway but not in induced cells expressing antisense complementary to genes in other pathways, then the test antibiotic acts against the pathway for which heightened sensitivity was observed.

[0253] One skilled in the art will appreciate that further optimization of the assay conditions, such as the concentration of inducer used to induce antisense expression and/or the growth conditions used for the assay (for example incubation temperature and media components) may further increase the selectivity and/or magnitude of the antibiotic sensitization exhibited.

[0254] The following example confirms the effectiveness of the methods described above.

### Example 11

### Identification of the Pathway in which a Proliferation-Required Gene Lies

[0255] Antibiotics of various chemical classes and modes of action were purchased from Sigma Chemicals (St. Louis, Mo.). Stock solutions were prepared by dissolving each antibiotic in an appropriate aqueous solution based on information provided by the manufacturer. The final working solution of each antibiotic contained no more than 0.2% (w/v) of any organic solvent. To determine their potency against a bacterial strain engineered for expression of an antisense complementary to a proliferation-required gene encoding 50S ribosomal protein, each antibiotic was serially diluted two or three fold in growth medium supplemented with the appropriate antibiotic for maintenance of the anti-sense construct. At least ten dilutions were prepared for each antibiotic. 25 μL aliquots of each dilution were transferred to discrete wells of a 384-well microplate (the assay plate) using a multi-channel pipette. Quadruplicate wells were used for each dilution of an antibiotic under each treatment condition (plus and minus inducer). Each assay plate contained twenty wells for cell growth controls (growth media replacing antibiotic), ten wells for each treatment (plus and minus inducer, in this example IPTG). Assay plates were usually divided into the two treatments: half the plate containing induced cells and an appropriate concentrations of inducer (in this example IPTG) to maintain the state of induction, the other half containing non-induced cells in the absence of IPTG.

[0256] Cells for the assay were prepared as follows. Bacterial cells containing a construct, from which expression of antisense nucleic acid complementary to rplL and rplJ, which encode proliferation-required 50S ribosomal subunit proteins, is inducible in the presence of IPTG, were grown into exponential growth (OD₆₀₀ 0.2 to 0.3) and then diluted 1:100 into fresh media containing either 400 μM or 0 μM inducer (IPTG). These cultures were incubated at 37° C. for 2.5 hr. After a 2.5 hr incubation, induced and non-induced cells were respectively diluted into an assay medium at a final OD₆₀₀ value of 0.0004. The medium contained an appropriate concentration of the antibiotic for the maintenance of the anti-sense construct. In addition, the medium used to dilute induced cells was supplemented with 800 μM IPTG so that addition to the assay plate would result in a final IPTG concentration of 400 μM. Induced and non-induced cell suspensions were dispensed (25 μl/well) into the appropriate wells of the assay plate as discussed previously. The plate was then loaded into a plate reader, incubated at constant temperature, and cell growth was monitored in each well by the measurement of light scattering at 595 nm. Growth was monitored every 5 minutes until the cell culture attained a stationary growth phase. For each concentration of antibiotic, a percentage inhibition of growth was calculated at the time point corresponding to mid-exponential growth for the associated control wells (no antibiotic, plus or minus IPTG). For each antibiotic and condition (plus or minus IPTG), a plot of percent inhibition versus log of antibiotic concentration was generated and the IC₅₀ determined. A comparison of the IC₅₀ for each antibiotic in the presence and absence of IPTG revealed whether induction of the antisense construct sensitized the cell to the mechanism of action exhibited by the antibiotic. Cells which exhibited a significant (standard statistical analysis) numerical decrease in the IC₅₀ value in the presence of inducer were considered to have an increased sensitivity to the test antibiotic.

[0257] The results are provided in the table below, which lists the classes and names of the antibiotics used in the analysis, the targets of the antibiotics, the IC₅₀ in the absence of IPTG, the IC₅₀ in the presence of IPTG, the concentration units for the IC₅₀s, the fold increase in IC₅₀ in the presence of IPTG, and whether increased sensitivity was observed in the presence of IPTG.

TABLE IV
Effect of Expression of Antisense RNA to rplL and rplJ on
Antibiotic Sensitivity

| | | | | | | |
|---|---|---|---|---|---|---|
| | | | | | Fold | |
| | | | | | In- | |
| | | | | | crease | |
| ANTI- | | | | | in | Sen- |
| BIOTIC | | | | | Sen- | sitivity |
| CLASS/ | TAR- | IC50 | IC50 | Conc. | si- | In- |
| Names | GET | (−IPTG) | (+IPTG) | Unit | tivity | creased? |

PROTEIN SYNTHESIS INHIBITOR
ANTIBIOTICS

| | | | | | | |
|---|---|---|---|---|---|---|
| AMINO- | | | | | | |
| GLYCO- | | | | | | |
| SIDES | | | | | | |
| Genta- | 30S | 2715 | 19.19 | ng/ml | 141 | Yes |
| micin | ribo- | | | | | |
| | some | | | | | |
| | function | | | | | |
| Strepto- | 30S | 11280 | 161 | ng/ml | 70 | Yes |
| mycin | ribo- | | | | | |
| | some | | | | | |
| | function | | | | | |
| Spectin- | 30S | 18050 | <156 | ng/ml | | Yes |
| omycin | ribo- | | | | | |
| | some | | | | | |
| | function | | | | | |
| Tobra- | 30S | 3594 | 70.58 | ng/ml | 51 | Yes |
| mycin | ribo- | | | | | |
| | some | | | | | |
| | function | | | | | |
| MACRO- | | | | | | |
| LIDES | | | | | | |
| Erythro- | 50S | 7467 | 187 | ng/ml | 40 | Yes |
| mycin | ribo- | | | | | |
| | some | | | | | |
| | function | | | | | |
| ARO- | | | | | | |
| MATIC | | | | | | |
| POYKE- | | | | | | |
| TIDES | | | | | | |
| Tetra- | 30S | 199.7 | 1.83 | ng/ml | 109 | Yes |
| cycline | ribo- | | | | | |
| | some | | | | | |
| | function | | | | | |
| Mino- | 30S | 668.4 | 3.897 | ng/ml | 172 | Yes |
| cycline | ribo- | | | | | |
| | some | | | | | |
| | function | | | | | |
| Doxy- | 30S | 413.1 | 27.81 | ng/ml | 15 | Yes |
| cycline | ribo- | | | | | |
| | some | | | | | |
| | function | | | | | |
| OTHER | | | | | | |
| PROTEIN | | | | | | |
| SYN- | | | | | | |
| THESIS | | | | | | |
| INHIB- | | | | | | |
| ITORS | | | | | | |
| Fusidic | Elonga- | 59990 | 641 | ng/ml | 94 | Yes |
| acid | tion | | | | | |
| | Factor | | | | | |
| | G | | | | | |
| | function | | | | | |
| Chloram- | 30S | 465.4 | 1.516 | ng/ml | 307 | Yes |
| phenicol | ribo- | | | | | |
| | some | | | | | |
| | function | | | | | |
| Linco- | 50S | 47150 | 324.2 | ng/ml | 145 | Yes |
| mycin | ribo- | | | | | |
| | some | | | | | |
| | function | | | | | |

OTHER ANTIBIOTIC MECHANISMS

| | | | | | | |
|---|---|---|---|---|---|---|
| B- | | | | | | |
| LAC- | | | | | | |
| TAMS | | | | | | |
| Cefoxi- | Cell | 2782 | 2484 | ng/ml | 1 | No |
| tin | wall | | | | | |
| | bio- | | | | | |
| | syn- | | | | | |
| | thesis | | | | | |
| Cefo- | Cell | 24.3 | 24.16 | ng/ml | 1 | No |
| taxime | wall | | | | | |
| | bio- | | | | | |
| | syn- | | | | | |
| | thesis | | | | | |
| DNA | | | | | | |
| SYN- | | | | | | |
| THESIS | | | | | | |
| INHIB- | | | | | | |
| ITORS | | | | | | |
| Nalidixic | DNA | 6973 | 6025 | ng/ml | 1 | No |
| acid | Gyrase | | | | | |
| | activity | | | | | |
| Ofloxacin | DNA | 49.61 | 45.89 | ng/ml | 1 | No |
| | Gyrase | | | | | |
| | activity | | | | | |
| OTHER | | | | | | |
| Bacitracin | Cell | 4077 | 4677 | ng/ml | 1 | No |
| | mem- | | | | | |
| | brane | | | | | |
| | function | | | | | |
| Trimeth- | Dihy- | 128.9 | 181.97 | ng/ml | 1 | No |
| oprim | drofo- | | | | | |
| | late | | | | | |
| | Re- | | | | | |
| | ductase | | | | | |
| | activity | | | | | |
| Vanco- | Cell | 145400 | 72550 | ng/ml | 2 | No |
| mycin | wall | | | | | |
| | bio- | | | | | |
| | syn- | | | | | |
| | thesis | | | | | |

[0258] The above results demonstrate that induction of an antisense RNA to genes encoding 50S ribosomal subunit proteins results in a selective and highly significant sensitization of cells to antibiotics that inhibit ribosomal function and protein synthesis. The above results further demonstrate that induction of an antisense construct to an essential gene sensitizes an organism to compounds that interfere with that gene products' biological role. This sensitization is restricted to compounds that interfere with pathways associated with the targeted gene and it's product.

[0259] Assays utilizing antisense constructs to essential genes can be used to identify compounds that specifically interfere with the activity of multiple targets in a pathway. Such constructs can be used to simultaneously screen a sample against multiple targets in one pathway in one reaction (Combinatorial HTS).

[0260] Furthermore, as discussed above, panels of antisense construct containing cells may be used to characterize the point of intervention of any compound affecting an essential biological pathway including antibiotics with no known mechanism of action.

[0261] Another embodiment of the present invention is a method for determining the pathway against which a test antibiotic compound is active in which the activity of target proteins or nucleic acids involved in proliferation-required pathways is reduced by contacting cells with a sub-lethal concentration of a known antibiotic which acts against the target protein or nucleic acid. In one embodiment, the target protein or nucleic acid is a target protein or nucleic acid corresponding to a proliferation-required nucleic acid identified using the methods described above. The method is similar to those described above for determining which pathway a test antibiotic acts against except that rather than reducing the activity or level of a proliferation-required gene product using a sub-lethal level of antisense to a proliferation-required nucleic acid, the activity or level of the proliferation-required gene product is reduced using sub-lethal level of a known antibiotic which acts against the proliferation required gene product.

[0262] Interactions between drugs which affect the same biological pathway has been described in the literature. For example, Mecillinam (Amdinocillin) binds to and inactivates the penicillin binding protein 2 (PBP2, product of the mrdA in E. coli). This antibiotic inteacts with other antibiotics that inhibit PBP2 as well as antibiotics that inhibit other penicillin binding proteins such as PBP3 [(Gutmann, L., Vincent, S., Billot-Klein, D., Acar, J. F., Mrena, E., and Williamson, R. (1986) Involvement of penicillin-binding protein 2 with other penicillin-binding proteins in lysis of Escherichia coli by some beta-lactam antibiotics alone and in synergistic lytic effect of amdinocillin (mecillinam). Antimicrobial Agents & Chemotherapy, 30:906-912), the disclosure of which is incorporated herein by reference in its entirety]. Interactions between drugs could, therefore, involve two drugs that inhibit the same target protein or nucleic acid or inhibit different proteins or nucleic acids in the same pathway [(Fukuoka, T., Domon, H., Kakuta, M., Ishii, C., Hirasawa, A., Utsui, Y., Ohya, S., and Yasuda, H. (1997) Combination effect between panipenem and vancomycin on highly methicillin-resistant Staphylococcus aureus. Japan. J. Antibio. 50:411-419; Smith, C. E., Foleno, B. E., Barrett, J. F., and Frosc, M. B. (1997) Assessment of the synergistic interactions of levofloxacin and ampicillin against Enterococcus faecium by the checkerboard agar dilution and time-kill methods. Diagnos. Microbiol. Infect. Disease 27:85-92; den Hollander, J. G., Horrevorts, A. M., van Goor, M. L., Verbrugh, H. A., and Mouton, J. W. (1997) Synergism between tobramycin and ceftazidime against a resistant Pseudomonas aeruginosa strain, tested in an in vitro pharmacokinetic model. Antimicrobial Agents & Chemotherapy. 41:95-110), the disclosure of all of which are incorporated herein by reference in their entireties].

[0263] Two drugs may interact even though they inhibit different targets. For example, the proton pump inhibitor, Omeprazole, and the antibiotic, Amoxycillin, two synergistic compounds acting together, can cure Helicobacter pylori infection [(Gabryelewicz, A., Laszewicz, W., Dzieniszewski, J., Ciok, J., Marlicz, K., Bielecki, D., Popiela, T., Legutko, J., Knapik, Z., Poniewierka, E. (1997) Multicenter evaluation of dual-therapy (omeprazol and amoxycillin) for Helicobacter pylori-associated duodenal and gastric ulcer (two years of the observation). J. Physiol. Pharmacol. 48 Suppl 4:93-105), the disclosure of which is incorporated herein by reference in its entirety].

[0264] The growth inhibition from the sub-lethal concentration of the known antibiotic may be at least about 5%, at least about 8%, at least about 10%, at least about 20%, at least about 30%, at least about 40%, at least about 50%, at least about 60%, or at least about 75%, or more.

[0265] Alternatively, the sub-lethal concentration of the known antibiotic may be determined by measuring the activity of the target proliferation-required gene product rather than by measuring growth inhibition.

[0266] Cells are contacted with a combination of each member of a panel of known antibiotics at a sub-lethal level and varying concentrations of the test antibiotic. As a control, the cells are contacted with varying concentrations of the test antibiotic alone. The IC₅₀ of the test antibiotic in the presence and absence of the known antibiotic is determined. If the IC₅₀s in the presence and absence of the known drug are substantially similar, then the test drug and the known drug act on different pathways. If the IC₅₀s are substantially different, then the test drug and the known drug act on the same pathway.

[0267] Another embodiment of the present invention is a method for identifying a candidate compound for use as an antibiotic in which the activity of target proteins or nucleic acids involved in proliferation-required pathways is reduced by contacting cells with a sub-lethal concentration of a known antibiotic which acts against the target protein or nucleic acid. In one embodiment, the target protein or nucleic acid is a target protein or nucleic acid corresponding to a proliferation-required nucleic acid identified using the methods described above. The method is similar to those described above for identifying candidate compounds for use as antibiotics except that rather than reducing the activity or level of a proliferation-required gene product using a sub-lethal level of antisense to a proliferation-required nucleic acid, the activity or level of the proliferation-required gene product is reduced using a sub-lethal level of a known antibiotic which acts against the proliferation required gene product.

[0268] The growth inhibition from the sub-lethal concentration of the known antibiotic may be at least about 5%, at least about 8%, at least about 10%, at least about 20%, at least about 30%, at least about 40%, at least about 50%, at least about 60%, or at least about 75%, or more.

[0269] Alternatively, the sub-lethal concentration of the known antibiotic may be determined by measuring the activity of the target proliferation-required gene product rather than by measuring growth inhibition.

[0270] In order to characterize test compounds of interest, cells are contacted with a panel of known antibiotics at a sub-lethal level and one or more concentrations of the test compound. As a control, the cells are contacted with the same concentrations of the test compound alone. The IC₅₀ of the test compound in the presence and absence of the known antibiotic is determined. If the IC₅₀ of the test compound is substantially different in the presence and absence of the known drug then the test compound is a good candidate for use as an antibiotic. As discussed above, once a candidate compound is identified using the above methods its structure may be optimized using standard techniques such as combinatorial chemistry.

[0271] Representative known antibiotics which may be used in each of the above methods are provided in the table below. However, it will be appreciated that other antibiotics may also be used.

| | | |
|---|---|---|
| | | RESISTANT |
| ANTIBIOTIC | INHIBITS/TARGET | MUTANTS |

Inhibitors of Transcription

| | | |
|---|---|---|
| Rifamycin, 1959 | Inhibits initiation of | rpoB, crp, cyaA |
| Rifampicin | transcription/β-subunit RNA | |
| Rifabutin | polymerase, rpoB | |
| Rifaximin | | |
| Streptolydigin | Accelerates transcription chain | rpoB |
| | termination/B-subunit RNA | |
| | polymerase | |
| Streptovaricin | an acyclic ansamycin, inhibits | rpoB |
| | RNA polymerase | |
| Actinomycin | Intercalates between 2 | pldA |
| D + EDTA | successive G-C pairs, rpoB, | |
| | inhibits RNA synthesis | |

Inhibitors of Nucleic Acid Metabolism

| | | |
|---|---|---|
| Quinolones, 1962 | α subunit gyrase and/or | |
| Nalidixic acid | topoisomerase IV, gyrA | gyrA orB, icd, |
| | | sloB |
| Oxolinic acid | | |
| Fluoroquinolones | α subunit gyrase, gyrA and/or | gyrA |
| Ciprofloxacin, 1983 | topoisomerase IV | norA (efflux in |
| | (probable target in Staph) | Staph) |
| Norfioxacin | | hipQ |
| Coumerins | Inhibits ATPase activity of | |
| Novobiocin | β- subunit gyrase, gyrB | gyrB, cysB, cysE, |
| | | nov, ompA |
| Coumermycin | Inhibits ATPase activity of | gyrB, hisW |
| | β-subunit gyrase, gyrB | |
| Albicidin | DNA synthesis | tsx (nucleoside |
| | | channel) |
| Metronidazole | Causes single-strand breaks in | nar |
| | DNA | |

Inhibitors of Metabolic Pathways

| | | |
|---|---|---|
| Sulfonamides, 1932 | blocks synthesis of dihydro- | folP, gpt, pabA, |
| Sulfanilamide | folate, dihydro-pteroate | pabB, pabC |
| | synthesis, folP | |
| Trimethoprim, 1962 | Inhibits dihydrofolate reductase, | folA, thyA |
| | folA | |
| Showdomycin | Nucleoside analogue capable of | nupC, pnp |
| | alkylating sulfhydryl groups, | |
| | inhibitor of thymidylate | |
| | synthetase | |
| Thiolactomycin | type II fatty acid synthase | emrB |
| | inhibitor | fadB, emrB due |
| | | to gene dosage |
| Psicofuranine | Adenosine glycoside antibiotic, | guaA, B |
| | target is GMP synthetase | |
| Triclosan | Inhibits fatty acid synthesis | fabI (envM) |
| Diazoborines | heterocyclic, contains boron, | fabI (envM) |
| Isoniazid | inhibit fatty acid synthesis, | |
| Ethionamide | enoyl-ACP reductase, fabI | |

Inhibitors of Translation

| | | |
|---|---|---|
| Phenylpropanoids | Binds to ribosomal peptidyl | |
| Chloramphenicol, | transfer center preventing | rrn, cmlA, marA, |
| 1947 | peptide translocation/binds to | ompF, ompR |
| | S6, L3, L6, L14, L16, L25, L26, | |
| | L27, but preferentially to L16 | |
| Tetracyclines, 1948, | Binding to 30S ribosomal | clmA (cmr), mar, |
| type II polyketides | subunit, “A” site on 30S | ompF |
| Minocycline | subunit, blocks peptide | |
| Doxycycline | elongation, strongest binding | |
| | to S7 | |
| Macrolides | Binding to 50 S ribosomal | |
| (type I polyketides) | subunit, 23S rRNA, blocks | rrn, rplC, rplD, |
| Erythromycin, 1950 | peptide translocation, L15, | rplV, mac |
| Carbomycin | L4, L12 | |
| Spiramycin, etc | | |
| Aminoglycosides | Irreversible binding to 30S | |
| Streptomycin, 1944 | ribosomal subunit, prevents | rpsL, strC, M, |
| | translation or causes | ubiF |
| Neomycin | mistranslation of mRNA/16S | atpA-E, ecfB, |
| | rRNA | hemAC, D, E, G, |
| | | topA, |
| Spectinomycin | | rpsC, D, E rrn, |
| | | spcB |
| Kanamycin | | atpA-atpE, cpxA, |
| Kasugamycin | | ecfB, hemA, B, |
| | | L, topA |
| | | ksgA, B, C, D, |
| Gentamicin, 1963 | | rplB, K, rpsI, |
| | | N, M, R |
| Amikacin | | rplF, ubiF |
| Paromycin | | cpxA |
| | | rpsL |
| Lincosamides | Binding to 50 S ribosomal | |
| Lincomycin, 1955 | subunit, blocks peptide | linB, rplN, O, |
| | translocation | rpsG |
| Clindamycin | | |
| Streptogramins | 2 components, Streptogramins | |
| Virginiamycin, 1955 | A&B, bind to the 50S ribosomal | |
| Pristinamycin | subunit blocking peptide | |
| | translocation and peptide bond | |
| | formation | |
| Synercid: | | |
| quinupristin/ | | |
| dalfopristin | | |
| Fusidanes | Inhibition of elongation factor | fusA |
| Fusidic Acid | G (EF-G) prevents peptide | |
| | translocation | |
| Kirromycin | Inhibition of elongation factor | tufA, B |
| (Mocimycin) | TU (EF-Tu), prevents peptide | |
| | bond formation | |
| Pulvomycin | Binds to and inhibits EF-TU | |
| Thiopeptin | Sulfur-containing antibiotic, | rplE |
| | inhibits protein synthesis, EF-G | |
| Tiamulin | Inhibits protein synthesis | rplC, rplD |
| Negamycin | Inhibits termination process | prfB |
| | of protein synthesis | |
| Oxazolidinones | 235 rRNA | |
| Linezolid | | |
| Isoniazid | | pdx |
| Nitrofurantoin | Inhibits protein synthesis, | nfnA, B |
| | nitroreductases convert | |
| | nitrofurantoin to highly reactive | |
| | electrophilic intermediates which | |
| | attack bacterial ribosomal | |
| | proteins non-specifically | |
| Pseudomonic Acids | Inhibition of isoleucyl tRNA | ileS |
| Mupirocin | synthetase-used for Staph, | |
| (Bactroban) | topical cream, nasal spray | |
| Indolmycin | Inhibits tryptophanyl-tRNA | trpS |
| Viomycin | synthetase | rrmA (23S rRNA |
| | | methyltransferase; |
| | | mutant has slow |
| | | growth rate, slow |
| | | chain elongation |
| | | rate, and |
| | | viomycin |
| | | resistance) |
| Thiopeptides | Binds to L11-23S RNA complex | |
| Thiostrepton | Inhibits GTP hydrolysis by | |
| | EF-G | |
| Micrococcin | Stimulates GTP hydrolysis by | |
| | EF-G | |

Inhibitors of Cell Walls/Membranes

| | | |
|---|---|---|
| β-lactams | Inhibition of one or more cell | |
| Penicillin, 1929 | wall transpeptidases, endo- | |
| Ampicillin | peptidases, and glycosidases | ampC, ampD, |
| Methicillin, 1960 | (PBPs), of the 12 PBPs only 2 | ampE, envZ, |
| | are essential: mrdA (PBP2) and | galU, hipA, hipQ, |
| | ftsI (pbpB, PBP3) | ompC, ompF, |
| | | ompR, ptsI, rfa, |
| | | tolD, tolE |
| Cephalosporins, | | tonB |
| 1962 | | |
| Mecillinam | Binds to and inactivates PBP2 | alaS, argS, crp, |
| (amdinocillin) | (mrdA) | cyaA, envB, |
| | | mrdA, B, |
| | | mreB, C, D |
| Aztreonam | Inactivates PBP3 (ftsI) | |
| (Furazlocillin) | | |
| Bacilysin, Tetaine | Dipeptide, inhib glucosamine | dppA |
| | synthase | |
| Glycopeptides | Inhib G+ cell wall syn, | |
| Vancomycin, 1955 | binds to terminal D-ala-D-ala | |
| | of pentapeptide, | |
| Polypeptides | Prevents dephosphorylation and | |
| Bacitracin | regeneration of lipid carrier | rfa |
| Cyclic lipopeptide | Disrupts multiple aspects of | |
| Daptomycin, 1980 | membrane function, including | |
| | peptidoglycan synthesis, lipo- | |
| | teichoic acid synthesis, and | |
| | the bacterial membrane potential | |
| Cyclic polypeptides | Surfactant action disrupts cell | pmrA |
| Polymixin, 1939 | membrane lipids, binds lipid A | |
| | mioety of LPS | |
| Fosfomycin, 1969 | Analogue of P-enolpyruvate, | murA, crp, cyaA |
| | inhibits 1^{st} step in | glpT, hipA, ptsI, |
| | peptidoglycan synthesis - | uhpT |
| | UDP-N-acetylglucosamine | |
| | enolpyruvyl transferase, murA. | |
| | Also acts as Immunosuppressant | |
| Cycloserine | Prevents formation of D-ala | hipA, cycA |
| | dimer, inhibits D-ala ligase, | |
| | ddlA, B | |
| Alafosfalin | phosphonodipeptide, cell wall | pepA, tpp |
| | synthesis inhibitor, potentiator | |
| | of β-lactams | |

Inhibitors of Protein Processing/Transport

| | | |
|---|---|---|
| Globomycin | Inhibits signal peptidase II | lpp, dnaE |
| | (cleaves prolipoproteins | |
| | subsequent to lipid | |
| | modification, lspA | |

### Example 12

### Transfer of Exogenous Nucleic Acid Sequences to other Bacterial Species Using the E. coli Expression Vectors or Expression Vectors Functional in Bacterial Species other than E. coli.

[0272] Molecule No. EcXA190, encoding a portion of the b3052 gene of Escherichia coli, was either transformed directly into Enterobacter cloacae, Salmonella typhimurium and/or Klebsiella pneumoniae or subcloned into an expression vector functional in these species and the subclones transformed into these organisms. Suitable expression vectors are well known in the art. These expression vectors were introduced into Enterobacter cloacae, Salmonella typhimurium and/or Klebsiella pneumoniae cells that were then assayed for growth inhibition according to the method of Example 1. After growth in liquid culture, cells were plated at various serial dilutions and a score determined by calculating the log difference in growth for INDUCED vs. UNINDUCED antisense RNA expression as determined by the maximum 10 fold dilution at which a colony was observed. If there was no effect of antisense RNA expression in one organism, the clone is given a score of zero “0” in that organism. In contrast, a score of “8” means that 10⁸ times more cells were required to observe a colony formed on the induced state than in the non-induced state under the conditions used and in that organism.

[0273] Expression vectors containing Molecule No. EcXA190 were found to inhibit bacterial growth in all four organisms when expression of the antisense RNA was induced with IPTG. A score of 4 was assigned for Escherichia coli, 6 for Enterobacter cloacae, and 8 for Salmonella typhimurium and 3 for Klebsiella pneumoniae (obvious additional growth defect as well). The protein encoded by this sequence may be used as a target sequence to screen candidate compound libraries as described above.

[0274] In addition, the above methods were validated using other antisense nucleic acids which inhibit the growth of E. coli which were identified using methods similar to those described above. Expression vectors which inhibited growth of E. coli upon induction of antisense RNA expression with IPTG were transformed directly into Enterobacter cloacae, Klebsiella pneumonia or Salmonella typhimurium. The transformed cells were then assayed for growth inhibition according to the method of Example 1. After growth in liquid culture, cells were plated at various serial dilutions and a score determined by calculating the log difference in growth for INDUCED vs. UNINDUCED antisense RNA expression as determined by the maximum 10 fold dilution at which a colony was observed. The results of these experiments are listed in Table V below. If there was no effect of antisense RNA expression in a microorganism, the clone is minus in Table V below. In contrast, a positive in Table V below means that at least 10 fold more cells were required to observe a colony on the induced plate than on the non-induced plate under the conditions used and in that microorganism.

TABLE V
Sensitivity of Other Microorganisms to Antisense Nucleic Acids
That Inhibit Proliferation in E. coli

| Mol. No. | S. typhimurium | E. cloacae | K. pneumoniae |
|---|---|---|---|
| EcXA001 | + | + | − |
| EcXA004 | + | − | − |
| EcXA005 | + | + | + |
| EcXA006 | − | − | − |
| EcXA007 | − | + | − |
| EcXA008 | + | − | + |
| EcXA009 | − | − | − |
| EcXA010 | + | + | + |
| EcXA011 | − | + | − |
| EcXA012 | − | + | − |
| EcXA013 | + | + | + |
| EcXA014 | + | + | − |
| EcXA015 | + | + | + |
| EcXA016 | + | + | + |
| EcXA017 | + | + | + |
| EcXA018 | + | + | + |
| EcXA019 | + | + | + |
| EcXA020 | + | + | + |
| EcXA021 | + | + | + |
| EcXA023 | + | + | + |
| EcXA024 | + | − | + |
| EcXA025 | − | − | − |
| EcXA026 | + | + | − |
| EcXA027 | + | + | − |
| EcXA028 | − | − | − |
| EcXA029 | − | − | − |
| EcXA030 | + | + | + |
| EcXA031 | + | − | − |
| EcXA032 | + | + | − |
| EcXA033 | + | + | + |
| EcXA034 | + | + | + |
| EcXA035 | — | − | − |
| EcXA036 | + | − | + |
| EcXA037 | + | + | − |
| EcXA038 | + | + | + |
| EcXA039 | + | − | − |
| EcXA041 | + | + | + |
| EcXA042 | − | + | + |
| EcXA043 | − | − | − |
| EcXA044 | − | − | − |
| EcXA045 | + | + | + |
| EcXA046 | − | − | − |
| EcXA047 | + | + | − |
| EcXA048 | − | − | − |
| EcXA049 | + | − | − |
| EcXA050 | − | − | − |
| EcXA051 | + | − | − |
| EcXA052 | + | − | − |
| EcXA053 | + | + | + |
| EcXA054 | − | − | + |
| EcXA055 | + | − | − |
| EcXA056 | + | − | + |
| EcXA057 | + | + | − |
| EcXA058 | − | − | − |
| EcXA059 | + | + | + |
| EcXA060 | − | − | − |
| EcXA061 | − | − | − |
| EcXA062 | − | − | − |
| EcXA063 | + | + | − |
| EcXA064 | − | − | − |
| EcXA065 | + | + | − |
| EcXA066 | − | − | − |
| EcXA067 | − | + | − |
| EcXA068 | − | − | − |
| EcXA069 | − | + | − |
| EcXA070 | − | − | − |
| EcXA071 | + | − | − |
| EcXA072 | + | − | + |
| EcXA073 | + | + | + |
| EcXA074 | + | + | + |
| EcXA075 | + | − | − |
| EcXA076 | − | + | − |
| EcXA077 | + | + | − |
| EcXA079 | + | + | + |
| EcXA080 | + | − | − |
| EcXA082 | − | + | − |
| EcXA083 | − | − | − |
| EcXA084 | − | + | − |
| EcXA086 | − | − | − |
| EcXA087 | − | − | − |
| EcXA088 | − | − | − |
| EcXA089 | − | − | − |
| EcXA090 | − | − | − |
| EcXA091 | − | − | − |
| EcXA092 | − | − | − |
| EcXA093 | − | − | − |
| EcXA094 | + | + | + |
| EcXA095 | + | + | − |
| EcXA096 | − | − | − |
| EcXA097 | + | − | − |
| EcXA098 | + | − | − |
| EcXA099 | − | − | − |
| EcXA100 | − | − | − |
| EcXA101 | − | − | − |
| EcXA102 | − | − | − |
| EcXA103 | − | + | − |
| EcXA104 | + | + | + |
| EcXA106 | + | + | − |
| EcXA107 | − | − | − |
| EcXA108 | − | − | − |
| EcXA109 | − | − | − |
| EcXA110 | + | + | − |
| EcXA111 | − | − | − |
| EcXA112 | − | + | − |
| EcXA113 | + | + | + |
| EcXA114 | − | + | − |
| EcXA115 | − | + | − |
| EcXA116 | + | + | − |
| EcXA117 | + | − | − |
| EcXA118 | − | − | − |
| EcXA119 | + | + | − |
| EcXA120 | − | − | − |
| EcXA121 | − | − | − |
| EcXA122 | + | − | + |
| EcXA123 | + | − | − |
| EcXA124 | − | − | − |
| EcXA125 | − | − | − |
| EcXA126 | − | − | − |
| EcXA127 | + | + | − |
| EcXA128 | − | − | − |
| EcXA129 | − | + | − |
| EcXA130 | + | + | − |
| EcXA132 | − | − | − |
| EcXA133 | − | − | − |
| EcXA136 | − | − | − |
| EcXA137 | − | − | − |
| EcXA138 | + | − | − |
| EcXA139 | − | − | − |
| EcXA140 | + | − | − |
| EcXA141 | + | − | − |
| EcXA142 | − | − | − |
| EcXA143 | − | + | − |
| EcXA144 | + | + | − |
| EcXA145 | − | − | − |
| EcXA146 | − | − | − |
| EcXA147 | − | − | − |
| EcXA148 | − | − | − |
| EcXA149 | + | + | + |
| EcXA150 | − | − | − |
| EcXA151 | + | − | − |
| EcXA152 | − | − | − |
| EcXA153 | + | + | − |
| EcXA154 | − | − | − |
| EcXA155 | − | − | ND |
| EcXA156 | − | + | − |
| EcXA157 | − | − | − |
| EcXA158 | − | − | − |
| EcXA159 | + | − | − |
| EcXA160 | + | − | − |
| EcXA162 | − | − | − |
| EcXA163 | − | − | − |
| EcXA164 | − | − | − |
| EcXA165 | − | − | − |
| EcXA166 | − | − | − |
| EcXA167 | − | − | − |
| EcXA168 | − | − | − |
| EcXA169 | − | + | − |
| EcXA171 | − | − | − |
| EcXA172 | − | − | − |
| EcXA173 | − | − | − |
| EcXA174 | − | − | − |
| EcXA175 | − | − | − |
| EcXA176 | − | − | − |
| EcXA178 | − | − | − |
| EcXA179 | − | − | − |
| EcXA180 | + | − | − |
| EcXA181 | − | − | − |
| EcXA182 | − | − | − |
| EcXA183 | − | − | − |
| EcXA184 | − | − | − |
| EcXA185 | − | − | − |
| EcXA186 | − | − | − |
| EcXA187 | + | + | + |
| EcXA189 | + | − | − |
| EcXA190 | + | + | + |
| EcXA191 | + | + | − |
| EcXA192 | − | + | − |

[0275] Thus, the ability of an antisense nucleic acid which inhibits the proliferation of E. coli to inhibit the growth of other organims may be evaluated by either transforming the antisense nucleic acid directly into other Escherichia species or inserting the antisense nucleic acid into expression vectors that are functional in other Gram negative species such as Enterobacter cloacae, Salmonella typhimurium, and/or Klebsiella pneumoniae. Similarly, the antisense nucleic acid can be inserted in expression vectors that are functional in Gram-positive species such as Staphylococcus aureus, Enterococcus faecalis and Streptococcus pneumoniae or other species.

[0276] Those skilled in the art will appreciate that a negative result in a heterologous microorganism does not mean that that microorganism is missing that gene nor does it mean that the gene is unessential. However, a positive result means that the heterologous microorganism contains a homologous gene which is required for proliferation of that microorganism. The homologous gene may be obtained using the methods described herein. Those cells that are inhibited by antisense may be used in cell-based assays as described herein for the identification and characterization of compounds in order to develop antibiotics effective in these microorganisms. Those skilled in the art will appreciate that an antisense molecule which works in the microorganism from which it was obtained will not always work in a heterologous microorganism.

### Example 13

### Use of Identified Exogenous Nucleic Acid Sequences as Probes

[0277] The identified sequence of the present invention can be used as probes to obtain the sequence of additional genes of interest from a second organism. For example, probes to genes encoding potential bacterial target proteins may be hybridized to nucleic acids from other organisms including other bacteria and higher organisms, to identify homologous sequences. Such hybridization might indicate that the protein encoded by the gene to which the probe corresponds is found in humans and therefore not necessarily a good drug target. Alternatively, the gene can be conserved only in bacteria and therefore would be a good drug target for a broad spectrum antibiotic or antimicrobial.

[0278] Probes derived from the identified nucleic acid sequences of interest or portions thereof can be labeled with detectable labels familiar to those skilled in the art, including radioisotopes and non-radioactive labels, to provide a detectable probe. The detectable probe can be single stranded or double stranded and can be made using techniques known in the art, including in vitro transcription, nick translation, or kinase reactions. A nucleic acid sample containing a sequence capable of hybridizing to the labeled probe is contacted with the labeled probe. If the nucleic acid in the sample is double stranded, it can be denatured prior to contacting the probe. In some applications, the nucleic acid sample can be immobilized on a surface such as a nitrocellulose or nylon membrane. The nucleic acid sample can comprise nucleic acids obtained from a variety of sources, including genomic DNA, cDNA libraries, RNA, or tissue samples.

[0279] Procedures used to detect the presence of nucleic acids capable of hybridizing to the detectable probe include well known techniques such as Southern blotting, Northern blotting, dot blotting, colony hybridization, and plaque hybridization. In some applications, the nucleic acid capable of hybridizing to the labeled probe can be cloned into vectors such as expression vectors, sequencing vectors, or in vitro transcription vectors to facilitate the characterization and expression of the hybridizing nucleic acids in the sample. For example, such techniques can be used to isolate, purify and clone sequences from a genomic library, made from a variety of bacterial species, which are capable of hybridizing to probes made from the sequences identified in Examples 5 and 6.

### Example 14

### Preparation of PCR Primers and Amplification of DNA

[0280] The identified E. coli genes corresponding directly to or located within the operon of nucleic acid sequences required for proliferation or portions thereof can be used to prepare PCR primers for a variety of applications, including the identification or isolation of homologous sequences from other species, for example S. typhimurium, E. cloacae, E. faecalis, S. pneumoniae, and K pneumoniae, which contain part or all of the homologous genes. Because homologous genes are related but not identical in sequence, those skilled in the art will often employ degenerate sequence PCR primers. Such degenerate sequence primers are designed based on conserved sequence regions, either known or suspected, such as conserved coding regions. The successful production of a PCR product using degenerate probes generated from the sequences identified herein would indicate the presence of a homologous gene sequence in the species being screened. The PCR primers are at least 10 nucleotides, and preferably at least 20 nucleotides in length. More preferably, the PCR primers are at least 20-30 nucleotides in length. In some embodiments, the PCR primers can be more than 30 nucleotides in length. It is preferred that the primer pairs have approximately the same G/C ratio, so that melting temperatures are approximately the same. A variety of PCR techniques are familiar to those skilled in the art. For a review of PCR technology, see Molecular Cloning to Genetic Engineering White, B. A. Ed. in Methods in Molecular Biology 67: Humana Press, Totowa 1997. When the entire coding sequence of the target gene is known, the 5′ and 3′ regions of the target gene can be used as the sequence source for PCR probe generation. In each of these PCR procedures, PCR primers on either side of the nucleic acid sequences to be amplified are added to a suitably prepared nucleic acid sample along with dNTPs and a thermostable polymerase such as Taq polymerase, Pfu polymerase, or Vent polymerase. The nucleic acid in the sample is denatured and the PCR primers are specifically hybridized to complementary nucleic acid sequences in the sample. The hybridized primers are extended. Thereafter, another cycle of denaturation, hybridization, and extension is initiated. The cycles are repeated multiple times to produce an amplified fragment containing the nucleic acid sequence between the primer sites.

### Example 15

### Inverse PCR

[0281] The technique of inverse polymerase chain reaction can be used to extend the known nucleic acid sequence identified in Examples 5 and 6. The inverse PCR reaction is described generally by Ochman et al., in Ch. 10 of PCR Technology: Principles and Applications for DNA Amplification, (Henry A. Erlich, Ed.) W. H. Freeman and Co. (1992). Traditional PCR requires two primers that are used to prime the synthesis of complementary strands of DNA. In inverse PCR, only a core sequence need be known.

[0282] Using the sequences identified as relevant from the techniques taught in Examples 5 and 6 and applied to other species of bacteria, a subset of exogenous nucleic sequences are identified that correspond to genes or operons that are required for bacterial proliferation. In species for which a genome sequence is not known, the technique of inverse PCR provides a method for obtaining the gene in order to determine the sequence or to place the probe sequences in full context to the target sequence to which the identified exogenous nucleic acid sequence binds.

[0283] To practice this technique, the genome of the target organism is digested with an appropriate restriction enzyme so as to create fragments of nucleic acid that contain the identified sequence as well as unknown sequences that flank the identified sequence. These fragments are then circularized and become the template for the PCR reaction. PCR primers are designed in accordance with the teachings of Example 15 and directed to the ends of the identified sequence. The primers direct nucleic acid synthesis away from the known sequence and toward the unknown sequence contained within the circularized template. After the PCR reaction is complete, the resulting PCR products can be sequenced so as to extend the sequence of the identified gene past the core sequence of the identified exogenous nucleic acid sequence identified. This process can be repeated iteratively if necessary. In this manner, the full sequence of each novel gene can be identified. Additionally the sequences of adjacent coding and noncoding regions can be identified.

### Example 16

### Identification of Genes Required for Staphylococcus aureus Proliferation

[0284] Genes required for proliferation in Staphylococcus aureus are identified according to the methods described above.

### Example 17

### Identification of Genes Required for Neisseria gonorrhoeae Proliferation

[0285] Genes required for proliferation in Neisseria gonorrhoeae are identified according to the methods described above.

### Example 18

### Identification of Genes Required for Pseudomonas aeruginosa Proliferation

[0286] Genes required for proliferation in Pseudomonas aeruginosa are identified according to the methods described above.

### Example 19

### Identification of Genes Required for Enterococcus faecalis Proliferation

[0287] Genes required for proliferation in Enterococcus faecalis are identified according to the methods described above.

### Example 20

### Identification of Genes Required for Haemophilus influenzae Proliferation

[0288] Genes required for proliferation in Haemophilus influenzae are identified according to the methods described above.

### Example 21

### Identification of Genes Required for Salmonella typhimurium Proliferation

[0289] Genes required for proliferation in Salmonella typhimurium are identified according to the methods described above.

### Example 22

### Identification of Genes Required for Helicobacter pylori Proliferation

[0290] Genes required for proliferation in Helicobacter pylori are identified according to the methods described above.

### Example 23

### Identification of Genes Required for Mycoplasma pneumoniae Proliferation

[0291] Genes required for proliferation in Mycoplasma pneumoniae are identified according to the methods described above.

### Example 24

### Identification of Genes Required for Plasmodium ovale Proliferation

[0292] Genes required for proliferation in Plasmodium ovale are identified according to the methods described above.

### Example 25

### Identification of Genes Required for Saccharomyces cerevisiae Proliferation

[0293] Genes required for proliferation in Saccharomyces cerevisiae are identified according to the methods described above.

### Example 26

### Identification of Genes Required for Entamoeba histolytica Proliferation

[0294] Genes required for proliferation in Entamoeba histolytica are identified according to the methods described above.

### Example 27

### Identification of Genes Required for Candida albicans Proliferation

[0295] Genes required for proliferation in Candida albicans are identified according to the methods described above.

### Example 28

### Identification of Genes Required for Klebsiella pneumoniae Proliferation

[0296] Genes required for proliferation in Klebsiella pneumoniae are identified according to the methods described above.

### Example 29

### Identification of Genes Required for Salmonella typhi Proliferation

[0297] Genes required for proliferation in Salmonella typhi are identified according to the methods described above.

### Example 30

### Identification of Genes Required for Salmonella paratyphi Proliferation

[0298] Genes required for proliferation in Salmonella paratyphi are identified according to the methods described above.

### Example 31

### Identification of Genes Required for Salmonella cholerasuis Proliferation

[0299] Genes required for proliferation in Salmonella cholerasuis are identified according to the methods described above.

### Example 32

### Identification of Genes Required for Staphylococcus epidermis Proliferation

[0300] Genes required for proliferation in Staphylococcus epidermis are identified according to the methods described above.

### Example 33

### Identification of Genes Required for Mycobacterium tuberculosis Proliferation

[0301] Genes required for proliferation in Mycobacterium tuberculosis are identified according to the methods described above.

### Example 34

### Identification of Genes Required for Mycobacterium leprae Proliferation

[0302] Genes required for proliferation in Mycobacterium leprae are identified according to the methods described above.

### Example 35

### Identification of Genes Required for Treponema pallidum Proliferation

[0303] Genes required for proliferation in Treponema pallidum are identified according to the methods described above.

### Example 36

### Identification of Genes Required for Bacillus anthracis Proliferation

[0304] Genes required for proliferation in Bacillus anthracis are identified according to the methods described above.

### Example 37

### Identification of Genes Required for Yersinia pestis Proliferation

[0305] Genes required for proliferation in Yersinia pestis are identified according to the methods described above.

### Example 38

### Identification of Genes Required for Clostridium botulinum Proliferation

[0306] Genes required for proliferation in Clostridium botulinum are identified according to the methods described above.

### Example 39

### Identification of Genes Required for Campylobacter jejuni Proliferation

[0307] Genes required for proliferation in Campylobacter jejuni are identified according to the methods described above.

### Example 40

### Identification of Genes Required for Chlamydia trachomatis Proliferation

[0308] Genes required for proliferation in Chlamydia trachomatis are identified according to the methods described above.

[0309] It will be appreciated that genes required for proliferation of any microorganism of interest, including those specifically mentioned herein, may be identified according to the methods described above.

[0310] Use of Isolated Exogenous Nucleic Acid Fragments as Antisense Antibiotics

[0311] In addition to using the identified sequences to enable screening of molecule libraries to identify compounds useful to identify antibiotics, the sequences themselves can be used as therapeutic agents. Specifically, the identified exogenous sequences in an antisense orientation can be provided to an individual to inhibit the translation of a bacterial target gene.

[0312] Generation of Antisense Therapeutics from Identified Exogenous Sequences

[0313] The sequences of the present invention can be used as antisense therapeutics for the treatment of bacterial infections or simply for inhibition of bacterial growth in vitro or in vivo. The therapy exploits the biological process in cells where genes are transcribed into messenger RNA (mRNA) that is then translated into proteins. Antisense RNA technology contemplates the use of antisense oligonucleotides complementary to a target gene that will bind to its target nucleic acid and decrease or inhibit the expression of the target gene. For example, the antisense nucleic acid may inhibit the translation or transcription of the target nucleic acid. In one embodiment, antisense oligonucleotides can be used to treat and control a bacterial infection of a cell culture containing a population of desired cells contaminated with bacteria. In another embodiment, the antisense oligonucleotides can be used to treat an organism with a bacterial infection.

[0314] Antisense oligonucleotides can be synthesized from any of the sequences of the present invention using methods well known in the art. In a preferred embodiment, antisense oligonucleotides are synthesized using artificial means. Uhlmann & Peymann, Chemical Rev. 90:543-584 (1990) review antisense oligonucleotide technology in detail. Modified or unmodified antisense oligonucleotides can be used as therapeutic agents. Modified antisense oligonucleotides are preferred since it is well known that antisense oligonucleotides are extremely unstable. Modification of the phosphate backbones of the antisense oligonucleotides can be achieved by substituting the intemucleotide phosphate residues with methylphosphonates, phosphorothioates, phosphoramidates, and phosphate esters. Nonphosphate intemucleotide analogs such as siloxane bridges, carbonate brides, thioester bridges, as well as many others known in the art may also be used. The preparation of certain antisense oligonucleotides with modified intemucleotide linkages is described in U.S. Pat. No. 5,142,047, hereby incorporated by reference.

[0315] Modifications to the nucleoside units of the antisense oligonucleotides are also contemplated. These modifications can increase the half-life and increase cellular rates of uptake for the oligonucleotides in vivo. For example, α-anomeric nucleotide units and modified nucleotides such as 1,2-dideoxy-d-ribofuranose, 1,2-dideoxy-1-phenylribofuranose, and N⁴,N⁴-ethano-5-methyl-cytosine are contemplated for use in the present invention.

[0316] An additional form of modified antisense molecules is found in peptide nucleic acids. Peptide nucleic acids (PNA) have been developed to hybridize to single and double stranded nucleic acids. PNA are nucleic acid analogs in which the entire deoxyribose-phosphate backbone has been exchanged with a chemically completely different, but structurally homologous, polyamide (peptide) backbone containing 2-aminoethyl glycine units. Unlike DNA, which is highly negatively charged, the PNA backbone is neutral. Therefore, there is much less repulsive energy between complementary strands in a PNA-DNA hybrid than in the comparable DNA-DNA hybrid, and consequently they are much more stable. PNA can hybridize to DNA in either a Watson/Crick or Hoogsteen fashion (Demidov et al., Proc. Natl. Acad. Sci. U.S.A. 92:2637-2641, 1995; Egholm, Nature 365:566-568, 1993; Nielsen et al., Science 254:1497-1500, 1991; Dueholm et al., New J. Chem. 21:19-31, 1997).

[0317] Molecules called PNA “clamps” have been synthesized which have two identical PNA sequences joined by a flexible hairpin linker containing three 8-amino-3,6-dioxaoctanoic acid units. When a PNA clamp is mixed with a complementary homopurine or homopyrimidine DNA target sequence, a PNA-DNA-PNA triplex hybrid can form which has been shown to be extremely stable (Bentin et al., Biochemistry 35:8863-8869, 1996; Eghohn et al., Nucleic Acids Res. 23:217-222, 1995; Griffith et al., J. Am. Chem. Soc. 117:831-832, 1995).

[0318] The sequence-specific and high affinity duplex and triplex binding of PNA have been extensively described (Nielsen et al., Science 254:1497-1500, 1991; Egholn et al., J. Am. Chem. Soc. 114:9677-9678, 1992; Egholm et al., Nature 365:566-568, 1993; Almarsson et al., Proc. Natl. Acad. Sci. U.S.A. 90:9542-9546, 1993; Demidov et al., Proc. Natl. Acad. Sci. U.S.A. 92:2637-2641, 1995). They have also been shown to be resistant to nuclease and protease digestion (Demidov et al., Biochem. Pharm. 48:1010-1313, 1994). PNA has been used to inhibit gene expression (Hanvey et al., Science 258:1481-1485,1992; Nielsen et al., Nucl. Acids. Res., 21:197-200, 1993; Nielsen et al., Gene 149:139-145, 1994; Good & Nielsen, Science, 95: 2073-2076, 1998; all of which are hereby incorporated by reference), to block restriction enzyme activity (Nielsen et al., supra., 1993), to act as an artificial transcription promoter (Mollegaard, Proc. Natl. Acad. Sci. U.S.A. 91:3892-3895, 1994) and as a pseudo restriction endonuclease (Demidov et al., Nucl. Acids. Res. 21:2103-2107, 1993). Recently, PNA has also been shown to have antiviral and antitumoral activity mediated through an antisense mechanism (Norton, Nature Biotechnol., 14:615-619, 1996; Hirschman et al., J. Investig. Med. 44:347-351, 1996). PNAs have been linked to various peptides in order to promote PNA entry into cells (Basu et al., Bioconj. Chem. 8:481-488, 1997; Pardridge et al., Proc. Natl. Acad. Sci. U.S.A. 92:5592-5596, 1995).

[0319] The antisense oligonucleotides contemplated by the present invention can be administered by direct application of oligonucleotides to a target using standard techniques well known in the art. The antisense oligonucleotides can be generated within the target using a plasmid, or a phage. Alternatively, the antisense nucleic acid may be expressed from a sequence in the chromosome of the target cell. For example, a promoter may be introduced into the chromosme of the target cell near the target gene such that the promoter directs teh transcription of the antisense nucleic acid. Alternatively, a nucleic acid containing the antisense sequence operably linked to a promoter may be introduced into the chromosome of the target cell. It is further contemplated that contemplated that the antisense oligonucleotide contemplated are incorporated in a ribozyme sequence to enable the antisense to specifically bind and cleave its target mRNA. For technical applications of ribozyme and antisense oligonucleotides see Rossi et al., Pharmacol. Ther. 50(2):245-254, (1991), which is hereby incorporated by reference. The present invention also contemplates using a retron to introduce an antisense oligonucleotide to a cell. Retron technology is exemplified by U.S. Pat. No. 5,405,775, which is hereby incorporated by reference. Antisense oligonucleotides can also be delivered using liposomes or by electroporation techniques which are well known in the art.

[0320] The antisense nucleic acids of the present invention can also be used to design antibiotic compounds comprising nucleic acids which function by intracellular triple helix formation. Triple helix oligonucleotides are used to inhibit transcription from a genome. The sequences identified as required for proliferation in the present invention, or portions thereof, can be used as templates to inhibit microorganism gene expression in individuals infected with such organisms. Traditionally, homopurine sequences were considered the most useful for triple helix strategies. However, homopyrimidine sequences can also inhibit gene expression. Such homopyrimidine oligonucleotides bind to the major groove at homopurine:homopyrimidine sequences. Thus, both types of sequences based on the sequences of the present invention that are required for proliferation are contemplated for use as antibiotic compound templates.

[0321] The antisense oligonucleotides of this example employ the identified sequences of the present invention to induce bacterial cell death or at least bacterial stasis by inhibiting target nucleic acid transcription or translation. Antisense oligonucleotides containing from about 8 to 40 nucleotides of the sequences of the present invention have sufficient complementary to form a duplex with the target sequence under physiological conditions.

[0322] To kill bacterial cells or inhibit their growth, the antisense oligonucleotides are applied to the bacteria or to the target cells under conditions that facilitate their uptake. These conditions include sufficient incubation times of cells and oligonucleotides so that the antisense oligonucleotides are taken up by the cells. In one embodiment, an incubation period of 7-10 days is sufficient to kill bacteria in a sample. An optimum concentration of antisense oligonucleotides is selected for use.

[0323] The concentration of antisense oligonucleotides to be used can vary depending on the type of bacteria sought to be controlled, the nature of the antisense oligonucleotide to be used, and the relative toxicity of the antisense oligonucleotide to the desired cells in the treated culture. Antisense oligonucleotides can be introduced to cell samples at a number of different concentrations preferably between 1×10⁻¹⁰M to 1×10⁻⁴M. Once the minimum concentration that can adequately control gene expression is identified, the optimized dose is translated into a dosage suitable for use in vivo. For example, an inhibiting concentration in culture of 1×10⁻⁷ translates into a dose of approximately 0.6 mg/kg body weight. Levels of oligonucleotide approaching 100 mg/kg body weight or higher may be possible after testing the toxicity of the oligonucleotide in laboratory animals. It is additionally contemplated that cells from the subject are removed, treated with the antisense oligonucleotide, and reintroduced into the subject. This range is merely illustrative and one of skill in the art are able to determine the optimal concentration to be used in a given case.

[0324] After the bacterial cells have been killed or controlled in a desired culture, the desired cell population may be used for other purposes.

### Example 41

[0325] The following example demonstrates the ability of an E. coli antisense oligonucleotide to act as a bactericidal or bacteriostatic agent to treat a contaminated cell culture system. The application of the antisense oligonucleotides of the present invention are thought to inhibit the translation of bacterial gene products required for proliferation.

[0326] The antisense oligonucleotide of this example corresponds to a 30 base phophorothioate modified oligodeoxynucelotide complementary to a nucleic acid involved in proliferation, such as Molecule Number EcXA118 (SEQ ID NO: 1). A sense oligodeoxynucelotide complementary to the antisense sequence is synthesized and used as a control. The oligonucleotides are synthesized and purified according to the procedures of Matsukura, et al., Gene 72:343 (1988). The test oligonucleotides are dissolved in a small volume of autoclaved water and added to culture medium to make a 100 micromolar stock solution.

[0327] Human bone marrow cells are obtained from the peripheral blood of two patients and cultured according standard procedures well known in the art. The culture is contaminated with the K-12 strain of E. coli and incubated at 37° C. overnight to establish bacterial infection.

[0328] The control and antisense oligonucleotide containing solutions are added to the contaminated cultures and monitored for bacterial growth. After a 10 hour incubation of culture and oligonucleotides, samples from the control and experimental cultures are drawn and analyzed for the translation of the target bacterial gene using standard microbiological techniques well known in the art. The target E. coli gene is found to be translated in the control culture treated with the control oligonucleotide, however, translation of the target gene in the experimental culture treated with the antisense oligonucleotide of the present invention is not detected or reduced.

[0329] One way to determine if a gene is essential for proliferation in a host or virulence in a host is to construct a conditional allele of the gene an infectious organism. The host is then challenged with the organism under conditions in which the product of the gene is functional or non-functional or has reduced activity or where the gene product is absent or else present but at a reduced level. If the gene is essential for proliferation or virulence the infection of the host will be diminished or abolished under conditions in which the product of the gene is not functional or has reduced activity or where the gene product is absent or else present but at a reduced level.

[0330] Since expression of an antisense nucleic acid complementary to a gene required for proliferation also decreases the synthesis of the gene product, antisense nucleic acids may also be used to evaluate whether a gene is essential for the proliferation or virulence of an infectious organism in the host. In such methods, nucleic acids encoding an antisense molecule complementary to the desired target gene are introduced into the infectious organism. For exampe, plasmids comprising one of SEQ ID NOs: 1-93 or fragments thereof which inhibit proliferation, may be introduced into the infectious organism. In some embodiments, the antisense nucleic acid may be transcribed from the IPTG-inducible promoter in pLEX5BA or from other regulated promoters or vector systems.

[0331] E. coli is transformed with the nucleic acid encoding the antisense molecule by electroporation and grown in medium which selects for the presence of the vector from which the antisense nucleic acid is expressed. The essentiality of the target for each antisense nucleic acid is verified in microorganisms grown in culture using the techniques described herein.

[0332] The ability of antisense expression to block E. coli infection in an animal is tested using the rabbit model of bacterial meningitis. A spinal needle is surgically placed into the cistema magna of New Zealand White rabbits. The rabbits are inoculated with 10⁵ to 10⁶ cells of a normally virulent E. coli strain expressing an antisense nucleic acid complementary to a gene required for proliferation. Repeated CSF sampling is undertaken to determine multiple parameters of injury and infection such as cytochemical abnormalities, intracranial pressure, cerebral edema, BBB permeability, cerebral perfusion pressure and recovery of viable E. coli cells. Control animals are given intravenous injections of saline, which will not induce expression of the antisense nucleic acid, while experimental animals are given IPTG in intravenous injections to induce expression of the antisense nucleic acid. Alternatively, expression of the antisense nucleic acid may be induced by intravenous infusion of IPTG at sub-toxic levels. If other promoters other than IPTG inducible promoters are used, the rabbits may be fed the inducer in their water.

[0333] The use of rabbits allows multiple CSF samples per animal (one rabbit can give up to 8 sequential samples without change in CSF pressure). Treated animals receive therapy from 2 hours post receiving inoculation up to several days. A typical efficacy study consists of 3 control animals and 3 treated animals.

[0334] The control animals in which expression of the antisense nucliec acid is not induced are not protected against infection with E. coli and there is a logarithmic increase in viable bacteria. In experimental animals, E. coli cells recovered from the site of infection are viable until antisense expression is subsequently induced. However, if the antisense nucleic acid is directed against a gene required for proliferation, after treatment with the inducer for antisense expression the E. coli cells infecting these rabbits will not multiply and fewer viable cells will be recovered from the site of infection. The E. coli cells recovered from the rabbits treated with the inducer are recovered, if still present, and assayed as above to determine if the promoter and gene are still present and functional. Conversely, if the antisense nucleic acid is not complementary to a gene required for proliferation, treatment of the rabbits with inducer will have no effect on E. coli viability.

### Example 42

[0335] A subject suffering from an E. coli infection is treated with the antisense oligonucleotide preparation of Example 39. The antisense oligonucleotide is provided in a pharmaceutically acceptable carrier at a concentration effective to inhibit the transcription or translation of the target nucleic acid. The present subject is treated with a concentration of antisense oligonucleotide sufficient to achieve a blood concentration of about 100 micromolar. The patient receives daily injections of antisense oligonucleotide to maintain this concentration for a period of 1 week. At the end of the week a blood sample is drawn and analyzed for the presence or absence of the orgranism using standard techniques well known in the art. There is no detectable evidence of E. coli and the treatment is terminated.

### Example 43

### Preparation and use of Triple Helix Probes

[0336] The sequences of microorganism genes required for proliferation of the present invention are scanned to identify 10-mer to 20-mer homopyrimidine or homopurine stretches that could be used in triple-helix based strategies for inhibiting gene expression. Following identification of candidate homopyrimidine or homopurine stretches, their efficiency in inhibiting gene expression is assessed by introducing varying amounts of oligonucleotides containing the candidate sequences into a population of bacterial cells that normally express the target gene. The oligonucleotides may be prepared on an oligonucleotide synthesizer or they may be purchased commercially from a company specializing in custom oligonucleotide synthesis, such as GENSET, Paris, France.

[0337] The oligonucleotides can be introduced into the cells using a variety of methods known to those skilled in the art, including but not limited to calcium phosphate precipitation, DEAE-Dextran, electroporation, liposome-mediated transfection or native uptake.

[0338] Treated cells are monitored for a reduction in proliferation using techniques such as monitoring growth levels as compared to untreated cells using optical density measurements. The oligonucleotides that are effective in inhibiting gene expression in cultured cells can then be introduced in vivo using the techniques well known in that art at a dosage level shown to be effective.

[0339] In some embodiments, the natural (beta) anomers of the oligonucleotide units can be replaced with alpha anomers to render the oligonucleotide more resistant to nucleases. Further, an intercalating agent such as ethidium bromide, or the like, can be attached to the 3′ end of the alpha oligonucleotide to stabilize the triple helix. For information on the generation of oligonucleotides suitable for triple helix formation see Griffm et al. (Science 245:967-971 (1989), which is hereby incorporated by this reference).

### Example 44

### Identification of Bacterial Strains from Isolated Specimens by PCR

[0340] Classical bacteriological methods for the detection of various bacterial species are time consuming and costly. These methods include growing the bacteria isolated from a subject in specialized media, cultivation on selective agar media, followed by a set of confirmation assays that can take from 8 to 10 days or longer to complete. Use of the identified sequences of the present invention provides a method to dramatically reduce the time necessary to detect and identify specific bacterial species present in a sample.

[0341] In one exemplary method, bacteria are grown in enriched media and DNA samples are isolated from specimens of, for example, blood, urine, stool, saliva or central nervous system fluid by conventional methods. A panel of PCR primers based on identified sequences unique to various species of microorganisms are then utilized in accordance with Example 12 to amplify DNA of approximately 100-200 nucleotides in length from the specimen. A separate PCR reaction is set up for each pair of PCR primers and after the PCR reaction is complete, the reaction mixtures are assayed for the presence of PCR product. The presence or absence of bacteria from the species to which the PCR primer pairs belong is determined by the presence or absence of a PCR product in the various test PCR reaction tubes.

[0342] Although the PCR reaction is used to assay the isolated sample for the presence of various bacterial species, other assays such as the Southern blot hybridization are also contemplated.

[0343] All documents cited herein are incorporated herein by reference in their entireties.

What is claimed is:

1. A purified or isolated nucleic acid sequence consisting essentially of one the sequence of nucleotides of SEQ ID NOs: 1-93, wherein expression of said nucleic acid in a microorganism is capable of inhibiting proliferation of a microorganism.

2. The nucleic acid sequence of claim 1, wherein said nucleic acid sequence is complementary to at least a portion of the nucleotide sequence of the coding strand of a gene whose expression is required for proliferation of a microorganism.

3. The nucleic acid of claim 1, wherein said nucleic acid sequence has a nucleotide sequence complementary to at least a portion of the nucleotide sequence of an RNA required for proliferation of a microorganism.

4. The nucleic acid of claim 3, wherein the nucleotide sequence of said RNA encodes more than one gene product.

5. A purified or isolated nucleic acid comprising a fragment of one of the nucleotide seuqence of SEQ ID NOs.: 1-93, said fragment selected from the group consisting of fragments comprising at least 10, at least 20, at least 25, at least 30, at least 50 and more than 50 consecutive nucleotides of one of the nucleotide sequences of SEQ ID NOs: 1-93.

6. A vector comprising a promoter operably linked to the nucleic acid sequence of claims 1, 2, 3, 4, or 5.

7. The vector of claim 6, wherein said promoter is active in a microorganism selected from the group consisting of Aspergillus fumigatus, Bacillus anthracis, Burkholderia cepacia, Campylobacter jejuni, Candida albicans, Candida glabrata (also called Torulopsis glabrata), Candida tropicalis, Candida parapsilosis, Candida guilliermondii, Candida krusei, Candida kefyr (also called Candida pseudotropicalis), Candida dubliniensis, Chlamydia pneumoniae, Chlamydia trachomatus, Clostridium botulinum, Clostridium difficile, Cryptococcus neoformans, Enterobacter cloacae, Enterococcus faecalis, Escherichia coli, Haemophilus influenzae, Helicobacter pylori, Klebsiella pneumoniae, Listeria monocytogenes, Mycobacterium leprae, Mycobacterium tuberculosis, Neisseria gonorrhoeae, Pseudomonas aeruginosa, Salmonella cholerasuis, Salmonella enterica, Salmonella paratyphi, Salmonella typhi, Salmonella typhimurium, Staphylococcus aureus, Klebsiella pneumoniae, Listeria monocytogenes, Moxarella catarrhalis, Shigella boydii, Shigella dysenteriae, Shigella flexneri, Shigella sonnei, Pseudomonas aeruginosa, Staphylococcus epidermidis, Streptococcus pneumoniae, Treponema pallidum, Yersinia pestis and any species falling within the genera of any of the above species.

8. A host cell containing the vector of claim 6.

9. A purified or isolated nucleic acid consisting essentially of the coding sequence of one of SEQ ID NOs: 106-112, 119-122, 134-160, 164-171, 179-265, 271-273, 275, and 279-286.

10. A fragment of the nucleic acid of claim 8, said fragment comprising at least 10, at least 20, at least 25, at least 30, at least 50 or more than 50 consecutive nucleotides of one of SEQ ID NOs: 106-112, 119-122, 134-160, 164-171, 179-265,271-273, 275, and 279-286.

11. A vector comprising a promoter operably linked to the nucleic acid of claim 9 or claim 10.

12. A purified or isolated antisense nucleic acid comprising a nucleic acid sequence complementary to at least a portion of an intragenic sequence, intergenic sequence, sequences spanning at least a portion of two or more genes, 5′ noncoding region, or 3′ noncoding region within an operon comprising a proliferation-required gene whose activity or expression is inhibited by an antisense nucleic acid comprising one of SEQ ID NOs.: 1-93.

13. A purified or isolated nucleic acid comprising a nucleic acid having at least 70% identity to a sequence selected from the group consisting of SEQ ID NOs.: 1-93, fragments comprising at least 25 consecutive nucleotides of SEQ ID NOs.: 1-93, the sequences complementary to SEQ ID NOs.: 1-93 and the sequences complementary to fragments comprising at least 25 consecutive nucleotides of SEQ ID NOs.: 1-93 as determined using BLASTN version 2.0 with the default parameters.

14. The nucleic acid of claim 13, wherein said nucleic acid is from an organism selected from the group consisting of Aspergillus fumigatus, Bacillus anthracis, Burkholderia cepacia, Campylobacter jejuni, Candida albicans, Candida glabrata (also called Torulopsis glabrata), Candida tropicalis, Candida parapsilosis, Candida guilliermondii, Candida krusei, Candida kefyr (also called Candida pseudotropicalis), Candida dubliniensis, Chlamydia pneumoniae, Chlamydia trachomatus, Clostridium botulinum, Clostridium difficile, Cryptococcus neoformans, Enterobacter cloacae, Enterococcus faecalis, Escherichia coli, Haemophilus influenzae, Helicobacter pylori, Klebsiella pneumoniae, Listeria monocytogenes, Mycobacterium leprae, Mycobacterium tuberculosis, Neisseria gonorrhoeae, Pseudomonas aeruginosa, Salmonella cholerasuis, Salmonella enterica, Salmonella paratyphi, Salmonella typhi, Salmonella typhimurium, Staphylococcus aureus, Klebsiella pneumoniae, Listeria monocytogenes, Moxarella catarrhalis, Shigella boydii, Shigella dysenteriae, Shigella flexneri, Shigella sonnei, Pseudomonas aeruginosa, Staphylococcus epidermidis, Streptococcus pneumoniae, Treponema pallidum, Yersinia pestis and any species falling within the genera of any of the above species.

15. A vector comprising a promoter operably linked to a nucleic acid encoding a polypeptide whose expression is inhibited by an antisense nucleic acid comprising one of SEQ ID NOs.: 1-93.

16. A host cell containing the vector of claim 15.

17. The vector of claim 15, wherein said polypeptide comprises a polypeptide comprising a sequence selected from the group consisting of SEQ ID NOs: 299-305, 312-315, 327-353, 357-364, 372-458, 464-466, 468 and 472-479.

18. A purified or isolated polypeptide comprising a polypeptide whose expression is inhibited by an antisense nucleic acid comprising one of SEQ ID NOs.: 1-93, or a fragment selected from the group consisting of fragments comprising at least 5, at least 10, at least 20, at least 30, at least 40, at least 50, at least 60 or more than 60 consecutive amino acids of one of the said polypeptides.

19. The polypeptide of claim 18, wherein said polypeptide comprises a polypeptide comprising one of SEQ ID NOs.: 299-305, 312-315, 327-353, 357-364, 372-458, 464-466, 468 and 472-479 or a fragment comprising at least 5, at least 10, at least 20, at least 30, at least 40, at least 50, at least 60 or more than 60 consecutive amino acids of a polypeptide comprising a sequence selected from the group consisting of SEQ ID NOs.: 299-305, 312-315, 327-353, 357-364, 372-458, 464-466, 468 and 472-479.

20. A purified or isolated polypeptide comprising a polypeptide having at least 25% identity to a polypeptide whose expression is inhibited by a sequence selected from the group consisting of SEQ ID NOs.: 1-93, or at least 25% identity to a fragment comprising at least 5, at least 10, at least 20, at least 30, at least 40, at least 50, at least 60 or more than 60 consecutive amino acids of a polypeptide whose expression is inhibited by a nucleic acid selected from the group consisting of SEQ ID NOs.: 1-93 as determined using FASTA version 3.0t78 with the default parameters.

21. The polypeptide of claim 20, wherein said polypeptide has at least 25% identity to a polypeptide comprising one of SEQ ID NOs: 299-305, 312-315, 327-353, 357-364, 372-458, 464-466, 468 and 472-479 or at least 25% identity to a fragment comprising at least 5, at least 10, at least 20, at least 30, at least 40, at least 50, at least 60 or more than 60 consecutive amino acids of a polypeptide comprising one of SEQ ID NOs.: 299-305, 312-315, 327-353, 357-364, 372-458, 464-466, 468 and 472-479 as determined using FASTA version 3.0t78 with the default parameters.

22. An antibody capable of specifically binding the polypeptide of one of claims 18-21.

23. A method of producing a polypeptide, comprising introducing a vector comprising a promoter operably linked to a nucleic acid encoding a polypeptide whose expression is inhibited by an antisense nucleic acid comprising one of SEQ ID NOs.: 1-93 into a cell and expressing said polypeptide.

24. The method of claim 23, further comprising the step of isolating said polypeptide.

25. The method of claim 23, wherein said polypeptide comprises a sequence selected from the group consisting of SEQ ID NOs.: 299-305, 312-315, 327-353, 357-364, 372-458, 464-466, 468 and 472-479.

26. A method of inhibiting proliferation of a microorganism comprising inhibiting the activity or reducing the amount of a gene product whose expression is inhibited by an antisense nucleic acid comprising a sequence selected from the group consisting of SEQ ID NOs.: 1-93 or inhibiting the activity or reducing the amount of a nucleic acid encoding said gene product.

27. The method of claim 26, wherein said gene product comprises a polypeptide comprising a sequence selected from the group consisting of SEQ ID NOs.: 299-305, 312-315, 327-353, 357-364, 372-458, 464-466, 468 and 472-479.

28. A method for identifying a compound which influences the activity of a gene product required for proliferation, said gene product comprising a gene product whose expression is inhibited by an antisense nucleic acid comprising a sequence selected from the group consisting of SEQ ID NOs.: 1-93, said method comprising:
contacting said gene product with a candidate compound; and
determining whether said compound influences the activity of said gene product.

29. The method of claim 28, wherein said gene product is a polypeptide and said activity is an enzymatic activity.

30. The method of claim 28, wherein said gene product is a polypeptide and said activity is a carbon compound catabolism activity.

31. The method of claim 28, wherein said gene product is a polypeptide and said activity is a biosynthetic activity.

32. The method of claim 28, wherein said gene product is a polypeptide and said activity is a transporter activity.

33. The method of claim 28, wherein said gene product is a polypeptide and said activity is a transcriptional activity.

34. The method of claim 28, wherein said gene product is a polypeptide and said activity is a DNA replication activity.

35. The method of claim 28, wherein said gene product is a polypeptide and said activity is a cell division activity.

36. A compound identified using the method of claim 28.

37. The method of claim 28, wherein said gene product is a polypeptide comprising a sequence selected from the group consisting of SEQ ID NOs.: 299-305, 312-315, 327-353, 357-364, 372-458, 464-466, 468 and 472-479.

38. A method for identifying a compound or nucleic acid having the ability to reduce the activity or level of a gene product required for proliferation, said gene product comprising a gene product whose activity or expression is inhibited by an antisense nucleic acid comprising a sequence selected from the group consisting of SEQ ID NOs.: 1-93, said method comprising:
(a) providing a target that is a gene or RNA, wherein said target comprises a nucleic acid encoding said gene product;
(b) contacting said target with a candidate compound or nucleic acid; and
(c) measuring an activity of said target.

39. The method of claim 38, wherein said target is a messenger RNA molecule and said activity is translation of said messenger RNA.

40. The method of claim 38, wherein said target is a messenger RNA molecule and said activity is transcription of a gene encoding said messenger RNA.

41. The method of claim 38, wherein said target is a gene and said activity is transcription of said gene.

42. The method of claim 38, wherein said target is a nontranslated RNA and said activity is processing or folding of said nontranslated RNA or assembly of said nontranslated RNA into a protein/RNA complex.

43. The method of claim 38, wherein said target gene or RNA encodes a polypeptide comprising a sequence selected from the group consisting of SEQ ID NOs.: 299-305, 312-315, 327-353, 357-364, 372-458, 464-466, 468 and 472-479.

44. A compound or nucleic acid identified using the method of claim 38.

45. A method for identifying a compound which reduces the activity or level of a gene product required for proliferation of a microorganism, wherein the activity or expression of said gene product is inhibited by an antisense nucleic acid comprising a sequence selected from the group consisting of SEQ ID NOs.: 1-93, said method comprising the steps of:
(a) expressing a sub-lethal level of an antisense nucleic acid complementary to a nucleic acid encoding said gene product in a cell to reduce the activity or amount of said gene product in said cell, thereby producing a sensitized cell;
(b) contacting said sensitized cell with a compound; and
(c) determining whether said compound inhibits the growth of said sensitized cell.

46. The method of claim 45, wherein said determining step comprises determining whether said compound inhibits the growth of said sensitized cell to a greater extent than said compound inhibits the growth of a nonsensitized cell.

47. The method of claim 45, wherein said cell is selected from the group consisting of bacterial cells, fingal cells, plant cells, and animal cells.

48. The method of claim 45, wherein said cell is a Gram negative bacterium.

49. The method of claim 45, wherein said cell is an E. coli cell.

50. The method of claim 45, wherein said cell is from an organism selected from the group consisting of Aspergillus fumigatus, Bacillus anthracis, Burkholderia cepacia, Campylobacter jejuni, Candida albicans, Candida glabrata (also called Torulopsis glabrata), Candida tropicalis, Candida parapsilosis, Candida guilliermondii, Candida krusei, Candida kefyr (also called Candida pseudotropicalis), Candida dubliniensis, Chlamydia pneumoniae, Chlamydia trachomatus, Clostridium botulinum, Clostridium difficile, Cryptococcus neoformans, Enterobacter cloacae, Enterococcus faecalis, Escherichia coli, Haemophilus influenzae, Helicobacter pylori, Klebsiella pneumoniae, Listeria monocytogenes, Mycobacterium leprae, Mycobacterium tuberculosis, Neisseria gonorrhoeae, Pseudomonas aeruginosa, Salmonella cholerasuis, Salmonella enterica, Salmonella paratyphi, Salmonella typhi, Salmonella typhimurium, Staphylococcus aureus, Klebsiella pneumoniae, Listeria monocytogenes, Moxarella catarrhalis, Shigella boydii, Shigella dysenteriae, Shigella flexneri, Shigella sonnei, Pseudomonas aeruginosa, Staphylococcus epidermidis, Streptococcus pneumoniae, Treponema pallidum, Yersinia pestis and any species falling within the genera of any of the above species.

51. The method of claim 45, wherein said antisense nucleic acid is transcribed from an inducible promoter.

52. The method of claim 51, further comprising the step of contacting said cell with a concentration of inducer which induces said antisense nucleic acid to a sub-lethal level.

53. The method of claim 45, wherein growth inhibition is measured by monitoring optical density of a culture growth solution.

54. The method of claim 45, wherein said gene product is a polypeptide.

55. The method of claim 54, wherein said polypeptide comprises a sequence selected from the group consisting of SEQ ID NOs.: 299-305, 312-315, 327-353, 357-364, 372-458, 464-466, 468 and 472-479.

56. The method of claim 45, wherein said gene product is an RNA.

57. A compound identified using the method of claim 45.

58. A method for inhibiting cellular proliferation comprising introducing a compound with activity against a gene whose activity or expression is inhibited by an antisense nucleic acid comprising a sequence selected from the group consisting of SEQ ID NOs.: 1-93 or a compound with activity against the product of said gene into a population of cells expressing said gene.

59. The method of claim 58, wherein said compound is an antisense nucleic acid comprising a sequence selected from the group consisting of SEQ ID NOs.: 1-93, or a proliferation-inhibiting portion thereof.

60. The method of claim 59, wherein said proliferation inhibiting portion of one of SEQ ID NOs.: 1-93 is a fragment comprising at least 10, at least 20, at least 25, at least 30, at least 50 or more than 51 consecutive nucleotides of one of SEQ ID NOs.: 1-93.

61. The method of claim 58, wherein said population is a population selected from the group consisting of bacterial cells, fungal cells, plant cells, and animal cells.

62. The method of claim 58, wherein said population is a population of Gram negative bacteria.

63. The method of claim 58, wherein said population is a population of E. coli cells.

64. The method of claim 58, wherein said population is a population selected from the group consisting of Aspergillus fumigatus, Bacillus anthracis, Burkholderia cepacia, Campylobacter jejuni, Candida albicans, Candida glabrata (also called Torulopsis glabrata), Candida tropicalis, Candida parapsilosis, Candida guilliermondii, Candida krusei, Candida kefyr (also called Candida pseudotropicalis), Candida dubliniensis, Chlamydia pneumoniae, Chlamydia trachomatus, Clostridium botulinum, Clostridium difficile, Cryptococcus neoformans, Enterobacter cloacae, Enterococcus faecalis, Escherichia coli, Haemophilus influenzae, Helicobacter pylori, Klebsiella pneumoniae,Listeria monocytogenes, Mycobacterium leprae, Mycobacterium tuberculosis, Neisseria gonorrhoeae, Pseudomonas aeruginosa, Salmonella cholerasuis, Salmonella enterica, Salmonella paratyphi, Salmonella typhi, Salmonella typhimurium, Staphylococcus aureus, Klebsiella pneumoniae, Listeria monocytogenes, Moxarella catarrhalis, Shigella boydii, Shigella dysenteriae, Shigella flexneri, Shigella sonnei, Pseudomonas aeruginosa, Staphylococcus epidermidis, Streptococcus pneumoniae, Treponema pallidum, Yersinia pestis and any species falling within the genera of any of the above species.

65. The method of claim 58, wherein said gene encodes a polypeptide comprising a sequence selected from the group consisting of SEQ ID NOs.: 299-305, 312-315, 327-353, 357-364, 372-458, 464-466, 468 and 472-479.

66. A preparation comprising an effective concentration of an antisense nucleic acid comprising a sequence selected from the group consisting of SEQ ID NOs.: 1-93, or a proliferation-inhibiting portion thereof in a pharmaceutically acceptable carrier.

67. The preparation of claim 66, wherein said proliferation-inhibiting portion of one of SEQ ID NOs.: 1-93 comprises at least 10, at least 20, at least 25, at least 30, at least 50 or more than 50 consecutive nucleotides of one of SEQ ID NOs.: 1-93.

68. A method for inhibiting the activity or expression of a gene in an operon required for proliferation wherein the activity or expression of at least one gene in said operon is inhibited by an antisense nucleic acid comprising a sequence selected from the group consisting of SEQ ID NOs.: 1-93, said method comprising contacting a cell in a cell population with an antisense nucleic acid comprising at least a proliferation-inhibiting portion of said operon.

69. The method of claim 68, wherein said antisense nucleic acid comprises a sequence selected from the group consisting of SEQ ID NOs.: 1-93 or a proliferation inhibiting portion thereof.

70. The method of claim 68, wherein said cell is contacted with said antisense nucleic acid by introducing a plasmid which expresses said antisense nucleic acid into said cell population.

71. The method of claim 68, wherein said cell is contacted with said antisense nucleic acid by introducing a phage which expresses said antisense nucleic acid into said cell population.

72. The method of claim 68, wherein said cell is contacted with said antisense nucleic acid by expressing said antisense nucleic acid from the chromosome of cells in said cell population.

73. The method of claim 68, wherein said cell is contacted with said antisense nucleic acid by introducing a promoter adjacent to a chromosomal copy of said antisense nucleic acid such that said promoter directs the synthesis of said antisense nucleic acid.

74. The method of claim 68, wherein said cell is contacted with said antisense nucleic acid by introducing a retron which expresses said antisense nucleic acid into said cell population.

75. The method of claim 68, wherein said cell is contacted with said antisense nucleic acid by introducing a ribozyme into said cell-population, wherein a binding portion of said ribozyme is complementary to said antisense oligonucleotide.

76. The method of claim 68, wherein said cell is contacted with said antisense nucleic acid by introducing a liposome comprising said antisense oligonucleotide into said cell.

77. The method of claim 68, wherein said cell is contacted with said antisense nucleic acid by electroporation of said antisense nucleic acid.

78. The method of claim 68, wherein said antisense nucleic acid is a fragment comprising at least 10, at least 20, at least 25, at least 30, at least 50 or more than 50 consecutive nucleotides of one of SEQ ID NOs.: 1-93.

79. The method of claim 68 wherein said antisense nucleic acid is an oligonucleotide.

80. A method for identifying a gene which is required for proliferation of a microorganism comprising:
(a) contacting a microorganism other than E. coli with a nucleic acid selected from the group consisting of SEQ ID NOs.: 1-93;
(b) determining whether said nucleic acid inhibits proliferation of said microorganism; and
(c) identifying the gene in said microorganism which is inhibited by said nucleic acid.

81. The method of claim 80, wherein said microorganism is a Gram negative bacterium.

82. The method of claim 80 wherein said microorganism is selected from the group consisting of Aspergillus fumigatus, Bacillus anthracis, Burkholderia cepacia, Campylobacter jejuni, Candida albicans, Candida glabrata (also called Torulopsis glabrata), Candida tropicalis, Candida parapsilosis, Candida guilliermondii, Candida krusei, Candida kefyr (also called Candida pseudotropicalis), Candida dubliniensis, Chlamydia pneumoniae, Chlamydia trachomatus, Clostridium botulinum, Clostridium difficile, Cryptococcus neoformans, Enterobacter cloacae, Enterococcus faecalis, Escherichia coli, Haemophilus influenzae, Helicobacter pylori, Klebsiella pneumoniae, Listeria monocytogenes, Mycobacterium leprae, Mycobacterium tuberculosis, Neisseria gonorrhoeae, Pseudomonas aeruginosa, Salmonella cholerasuis, Salmonella enterica, Salmonella paratyphi, Salmonella typhi, Salmonella typhimurium, Staphylococcus aureus, Klebsiella pneumoniae, Listeria monocytogenes, Moxarella catarrhalis, Shigella boydii, Shigella dysenteriae, Shigella flexneri, Shigella sonnei, Pseudomonas aeruginosa, Staphylococcus epidermidis, Streptococcus pneumoniae, Treponema pallidum, Yersinia pestis and any species falling within the genera of any of the above species.

83. The method of claim 80, further comprising introducing said nucleic acid into a vector functional in said microorganism prior to introducing said inhibitory nucleic acid into said microorganism.

84. A method for identifying a compound having the ability to inhibit proliferation of a microorganism comprising:
(a) identifying in a first microorganism a homolog of a gene or gene product present in a second microorganism which is different than said first microorganism, wherein the activity or level of said gene or gene product is inhibited by a nucleic acid comprising a sequence selected from the group consisting of SEQ ID NOs. 1-93;
(b) identifying an inhibitory nucleic acid sequence which inhibits the activity of said homolog in said first microorganism;
(c) contacting said first microorganism with a sub-lethal level of said inhibitory nucleic acid, thus sensitizing said first microorganism;
(d) contacting the sensitized microorganism of step (c) with a compound; and
(e) determining whether said compound inhibits proliferation of said sensitized microorganism.

85. The method of claim 84, wherein said determining step comprises determining whether said compound inhibits proliferation of said sensitized microorganism to a greater extent than said compound inhibits proliferation of a nonsensitized microorganism.

86. The method of claim 84 wherein step (a) comprises identifying a homologous nucleic acid to a gene or gene product whose activity or level is inhibited by a nucleic acid selected from the group consisting of SEQ ID NOs. 1-93 or a nucleic acid encoding a homologous polypeptide to a polypeptide whose activity or level is inhibited by a nucleic acid selected from the group consisting of SEQ ID NOs. 1-93 by using an algorithm selected from the group consisting of BLASTN version 2.0 with the default parameters and FASTA version 3.0t78 algorithm with the default parameters to identify said homologous nucleic acid or said nucleic acid encoding a homologous polypeptide in a database.

87. The method of claim 84 wherein said step (a) comprises identifying a homologous nucleic acid or a nucleic acid encoding a homologous polypeptide by identifying nucleic acids which hybridize to said first gene.

88. The method of claim 84 wherein the step (a) comprises expressing a nucleic acid selected from the group consisting of SEQ ID NOs. 1-93 in said microorganism.

89. The method of claim 84, wherein said inhibitory nucleic acid is an antisense nucleic acid.

90. The method of claim 84, wherein said inhibitory nucleic acid comprises an antisense nucleic acid to a portion of said homolog.

91. The method of claim 84, wherein said inhibitory nucleic acid comprises an antisense nucleic acid to a portion of the operon encoding said homolog.

92. The method of claim 84, wherein the step of contacting the first microorganism with a sub-lethal level of said inhibitory nucleic acid comprises directly contacting said microorganism with said inhibitory nucleic acid.

93. The method of claim 84, wherein the step of contacting the first microorganism with a sub-lethal level of said inhibitory nucleic acid comprises expressing an antisense nucleic acid to said homolog in said microorganism.

94. The method of claim 84, wherein said gene product comprises a polypeptide comprising a sequence selected from the group consisting of SEQ ID NOs.: 299-305, 312-315, 327-353, 357-364, 372-458, 464-466, 468 and 472-479.

95. A compound identified using the method of claim 84.

96. A method of identifying a compound having the ability to inhibit proliferation comprising:
(a) contacting a microorganism other than E. coli with a sub-lethal level of a nucleic acid comprising a sequence selected from the group consisting of SEQ ID NOs. 1-93 or a portion thereof which inhibits the proliferation of E. coli, thus sensitizing said microorganism;
(b) contacting the sensitized microorganism of step (a) with a compound; and
(c) determining whether said compound inhibits proliferation of said sensitized microorganism.

97. The method of claim 96, wherein said determining step comprises determining whether said compound inhibits proliferation of said sensitized microorganism to a greater extent than said compound inhibits proliferation of a nonsensitized microorganism.

98. A compound identified using the method of claim 96.

99. A method for identifying a compound having activity against a biological pathway required for proliferation comprising:
(a) sensitizing a cell by expressing a sub-lethal level of an antisense nucleic acid complementary to a nucleic acid encoding a gene product required for proliferation, wherein the activity or expression of said gene product is inhibited by an antisense nucleic acid comprising a sequence selected from the group consisting of SEQ ID NOs.: 1-93, in said cell to reduce the activity or amount of said gene product;
(b) contacting the sensitized cell with a compound; and
(c) determining whether said compound inhibits the growth of said sensitized cell.

100. The method of claim 99, wherein said determining step comprises determining whether said compound inhibits the growth of said sensitized cell to a greater extent than said compound inhibits the growth of a nonsensitized cell.

101. The method of claim 99, wherein said cell is selected from the group consisting of bacterial cells, fungal cells, plant cells, and animal cells.

102. The method of claim 99, wherein said cell is a Gram negative bacterium.

103. The method of claim 99, wherein said Gram negative bacterium is E. coli.

104. The method of claim 99, wherein said cell is selected from the group consisting of Aspergillus fumigatus, Bacillus anthracis, Burkholderia cepacia, Campylobacter jejuni, Candida albicans, Candida glabrata (also called Torulopsis glabrata), Candida tropicalis, Candida parapsilosis, Candida guilliermondii, Candida krusei, Candida kefyr (also called Candida pseudotropicalis), Candida dubliniensis, Chlamydia pneumoniae, Chlamydia trachomatus, Clostridium botulinum, Clostridium difficile, Cryptococcus neoformans, Enterobacter cloacae, Enterococcus faecalis, Escherichia coli, Haemophilus influenzae, Helicobacter pylori, Klebsiella pneumoniae, Listeria monocytogenes, Mycobacterium leprae, Mycobacterium tuberculosis, Neisseria gonorrhoeae, Pseudomonas aeruginosa, Salmonella cholerasuis, Salmonella enterica, Salmonella paratyphi, Salmonella typhi, Salmonella typhimurium, Staphylococcus aureus, Klebsiella pneumoniae, Listeria monocytogenes, Moxarella catarrhalis, Shigella boydii, Shigella dysenteriae, Shigella flexneri, Shigella sonnet, Pseudomonas aeruginosa, Staphylococcus epidermidis, Streptococcus pneumoniae, Treponema pallidum, Yersinia pestis and any species falling within the genera of any of the above species.

105. The method of claim 99, wherein said antisense nucleic acid is transcribed from an inducible promoter.

106. The method of claim 99, further comprising contacting the cell with an agent which induces expression of said antisense nucleic acid from said inducible promoter, wherein said antisense nucleic acid is expressed at a sub-lethal level.

107. The method of claim 99, wherein inhibition of proliferation is measured by monitoring the optical density of a liquid culture.

108. The method of claim 99, wherein said gene product comprises a polypeptide comprising a sequence selected from the group consisting of SEQ ID NOs.: 299-305, 312-315, 327-353, 357-364, 372-458, 464-466, 468 and 472-479

109. A compound identified using the method of claim 99.

110. A method for identifying a compound having the ability to inhibit cellular proliferation comprising:
(a) contacting a cell with an agent which reduces the activity or level of a gene product required for proliferation of said cell, wherein said gene product is a gene product whose activity or expression is inhibited by an antisense nucleic acid comprising a sequence selected from the group consisting of SEQ ID NOs.: 1-93;
(b) contacting said cell with a compound; and
(c) determining whether said compound reduces proliferation of said contacted cell.

111. The method of claim 110, wherein said determining step comprises determining whether said compound reduces proliferation of said contacted cell to a greater extent than said compound reduces proliferation of cells which have not been contacted with said agent.

112. The method of claim 110, wherein said agent which reduces the activity or level of a gene product required for proliferation of said cell comprises an antisense nucleic acid to a gene or operon required for proliferation.

113. The method of claim 110, wherein said agent which reduces the activity or level of a gene product required for proliferation of said cell comprises a compound known to inhibit growth or proliferation of a microorganism.

114. The method of claim 110, wherein said cell contains a mutation which reduces the activity or level of said gene product required for proliferation of said cell.

115. The method of claim 114, wherein said mutation is a temperature sensitive mutation.

116. The method of claim 110, wherein said gene product comprises a polypeptide comprising a sequence selected from the group consisting of SEQ ID NOs.: 299-305, 312-315, 327-353, 357-364, 372-458, 464-466, 468 and 472-479

117. A compound identified using the method of claim 110.

118. A method for identifying the biological pathway in which a proliferation-required gene or its gene product lies, wherein said gene or gene product comprises a gene or gene product whose activity or expression is inhibited by an antisense nucleic acid comprising a sequence selected from the group consisting of SEQ ID NOs.: 1-93, said method comprising:
(a) expressing a sub-lethal level of an antisense nucleic acid which inhibits the activity of said proliferation-required gene or gene product in a cell;
(b) contacting said cell with a compound known to inhibit growth or proliferation of a microorganism, wherein the biological pathway on which said compound acts is known; and
(c) determining whether said cell is sensitive to said compound.

119. The method of claim 118, wherein said determining step comprises determining whether said cell has a substantially greater sensitivity to said compound than a cell which does not express said sub-lethal level of said antisense nucleic acid and wherein said gene or gene product lies in the same pathway on which said compound acts if said cell expressing said sub-lethal level of said antisense nucleic acid has a substantially greater sensitivity to said compound than said cell which does not express said sub-lethal level of said antisense nucleic acid.

120. The method of claim 118, wherein said gene product comprises a polypeptide comprising a sequence selected from the group consisting of SEQ ID NOs.: 299-305, 312-315, 327-353, 357-364, 372-458, 464-466, 468 and 472-479

121. A method for determining the biological pathway on which a test compound acts comprising:
(a) expressing a sub-lethal level of an antisense nucleic acid complementary to a proliferation-required nucleic acid in a cell, wherein the activity or expression of said proliferation-required nucleic acid is inhibited by an antisense nucleic acid comprising a sequence selected from the group consisting of SEQ ID NOs.: 1-93 and wherein the biological pathway in which said proliferation-required nucleic acid or a protein encoded by said proliferation-required polypeptide lies is known, (b) contacting said cell with said test compound; and
(c) determining whether said cell is sensitive to said test compound.

122. The method of claim 121, wherein said determining step comprises determining whether said cell has a substantially greater sensitivity to said test compound than a cell which does not express said sub-lethal level of said antisense nucleic acid.

123. The method of claim 121, further comprising:
(d) expressing a sub-lethal level of a second antisense nucleic acid complementary to a second proliferation-required nucleic acid in a second cell, wherein said second proliferation-required nucleic acid is in a different biological pathway than said proliferation-required nucleic acid in step (a); and
(e) determining whether said second cell does not have a substantially greater sensitivity to said test compound than a cell which does not express said sub-lethal level of said second antisense nucleic acid, wherein said test compound is specific for the biological pathway against which the antisense nucleic acid of step (a) acts if said second cell does not have substantially greater sensitivity to said test compound.

124. A purified or isolated nucleic acid comprising a sequence selected from the group consisting of SEQ ID NOs.: 1-93.

125. A compound which interacts with a gene or gene product whose activity or expression is inhibited by an antisense nucleic acid comprising one of SEQ ID NOs.: 1-93 to inhibit proliferation.

126. A compound which interacts with a polypeptide whose expression is inhibited by an antisense nucleic acid comprising one of SEQ ID NOs.: 1-93 to inhibit proliferation.

127. A method for manufacturing an antibiotic comprising the steps of:
screening one or more candidate compounds to identify a compound that reduces the activity or level of a gene product required for proliferation, said gene product comprising a gene product whose activity or expression is inhibited by an antisense nucleic acid comprising a sequence selected from the group consisting of SEQ ID NOs.: 1-93; and
manufacturing the compound so identified.

128. The method of claim 127, wherein said screening step comprises performing any one of the methods of claims 28, 38, 45, 96, 99 and 110.

129. A method for inhibiting proliferation of a microorganism in a subject comprising administering a compound that reduces the activity or level of a gene product required for proliferation of said microorganism, said gene product comprising a gene product whose activity or expression is inhibited by an antisense nucleic acid comprising a sequence selected from the group consisting of SEQ ID NOs.: 1-93 to said subject.

130. The method of claim 129 wherein said subject is selected from the group consisting of vertebrates, mammals, avians, and human beings.

131. The method of claim 129, wherein said gene product comprises a polypeptide comprising a sequence selected from the group consisting of SEQ ID NOs.: 299-305, 312-315, 327-353, 357-364, 372-458, 464-466, 468 and 472-479.

The application's sequence listing, which the Patent Office published only in electronic form, follows.

SEQUENCE LISTING (481 sequences)

SEQ ID NO: 1 - DNA, 142 bp, Escherichia coli
cgctccttagagtacttctggtgccagagagataattttcatgaacttctcactacgaagctcacgagttaccggcccaaaaatacgcgtaccgataggctgctcgctgttgttgttcagaagaacacaagcattaccatcg

SEQ ID NO: 2 - DNA, 154 bp, Escherichia coli
  misc_feature (1)...(154): n = A,T,C or G
gctccttagagtacttntggtgccggagagataattttcatgaacttctcactacnaagctcacgagttaccggcccaaaaatacgcgtaccgataggctgctcgctgttgttgttcacgaagaacacaagcattaccatcgaagcgaatgaca

SEQ ID NO: 3 - DNA, 140 bp, Escherichia coli
tacttctggtgccagagagataattttcatgaacttctcactacgaagctcacgagttaccggcccaaaaatacgcgtaccgataggctgctcgctgttgttgttcagaagaacacaagcattaccatcgaagcgaatga

SEQ ID NO: 4 - DNA, 177 bp, Escherichia coli
cgctccttagagtacttctggtgccagagagataattttcatgaacttctcactacgaagctcacgagttaccggcccaaaaatacgcgtaccgataggctgctcgctgttgttgttcagaagaacacaagcattaccatcgaagcgaatgacagaaccgtccgggcgacgaacacc

SEQ ID NO: 5 - DNA, 255 bp, Escherichia coli
ctctttttcttcgagatggacgcagtgagcaaagacacagtttttaccggtcaggccgtactgatggtaaacatccagataaccatcatggtcaggataaagcgatttcacccaggcaatttcatctttgttttcacagagatgggtatgtacccacgtatccggatattcttctttcaggcgttgcgccatcgccatctgttcaggagatgaggtcggggcgaagcgtggcgtaatcgcatatagcagacgacc

SEQ ID NO: 6 - DNA, 395 bp, Escherichia coli
tccgcgatcgcggataaaaaggaggatttaaataaggcgttgatgcgccgtttgaagtcggcaatattaagccgcatgccatctcgacatgcggcttatacggtttaccagctatatttcactcccagcatgccctgagtatcgctatagcctttatcacctagttgcacaccgacattcccccacaggctaaggttgttatttactttcgcctcaaccccggtacgtacttcaccgagattacgcgcaccttcacggcctacggtttgaccattcatcttcacggcgtagactttgctattgttgatccagttcgcttcaatgtaaggctggaactcacgctgtttaccatcgtcacgctggtgatggctgttcaggtaggttttcaccccaag

SEQ ID NO: 7 - DNA, 280 bp, Escherichia coli
tgatcgatcaggtaatttgccagcggtagataattagtgatgatttgcactggcttgccacacatttcccgcccaagcagaaacgcggtggagccgcagttgatgactacgctttcgcccggattaaccagctgcgaggccgctttagcgatacgtactttttcatcgtgattctgcgcctgatgcagattcatcggcgtccagcgcgggcgctgttgggtaatagcttctgcgccattgcgcacttttttcagtttgccgctttcgtcaagtttattga

SEQ ID NO: 8 - DNA, 363 bp, Escherichia coli
agtaaaggatatacaaatttaaaggaagttgcggcgaagtcaaaacttacagatacaacggtttcaattccgataacagccagttactacgtctacgatacaaacaaagttaaatctggcgcactggaggcaaccgcattaatcaacgtgaaatacgactaataacaagcaagacgagcaagtggctaataataaaaaataacaaggtgtctgcatttccccctcatgatgagggggctttttttagcgatgataaaaaatctcaccgtcgtaggctttaatgattttaccgtcggtgtcgctgatcaacacgtacgcgccacccatataggtccagtgcgtcccggcatcaggcgcgggcag

SEQ ID NO: 9 - DNA, 295 bp, Escherichia coli
ttacagatacaacggtttcaattccgataacagccagttactacgtctacgatacaaacaaagttaaatctggcgcactggaggcaaccgcattaatcaacgtgaaatacgactaataacaagcaagacgagcaagtggctaataataaaaaataacaaggtgtctgcatttccccctcatgatgagggggctttttttagcgatgataaaaaatctcaccgtcgtaggctttaatgattttaccgtcggtgtcgctgatcaacacgtacgcgccacccatataggtccagtgcg

SEQ ID NO: 10 - DNA, 161 bp, Escherichia coli
acgactaataacaagcaagacgagcaagtggctaataataaaaaataacaaggtgtctgcatttccccctcatgatgagggggctttttttagcgatgataaaaaatctcaccgtcgtaggctttaatgattttaccgtcggtgtcgctgatcaacacgta

SEQ ID NO: 11 - DNA, 290 bp, Escherichia coli
tgcggcgaagtcaaaacttacagatacaacggtttcaattccgataacagccagttactacgtctacgatacaaacaaagttaaatctggcgcactggaggcaaccgcattaatcaacgtgaaatacgactaataacaagcaagacgagcaagtggctaataataaaaaataacaaggtgtctgcatttccccctcatgatgagggggctttttttagcgatgataaaaaatctcaccgtcgtaggctttaatgattttaccgtcggtgtcgctgatcaacacgtacgcg

SEQ ID NO: 12 - DNA, 137 bp, Escherichia coli
ctggttttagcttttgcttcgtaaacacgtaataaaacgtcctcacacaatatgaggacgccgaattttagggcgatgccgaaaaggtgtcaagaaatatacaacgatcccgccatcaccaggccatctggctgggg

SEQ ID NO: 13 - DNA, 275 bp, Escherichia coli
cgtcatgtacgtgcagtttggtcgtacgcttgatgaatttaccgtagatcgggtgtttcacaaaacgttcgatagcaacaacaatggatttctccattttgtcgctaacaacgcgaccttgcagagtacggattttatcggtcattacgcacccgccttctcgttcagtaaagtcttaacgcgtgcgacatcgcgacgcacttgcttcaacaggtgagactgttgcagctggccacttgcagcctgcatacgcaggttgaactgctcacgcagca

SEQ ID NO: 14 - DNA, 239 bp, Escherichia coli
tgtcggtaaacaatgacaatttgagacagagtgaaaggtcagatttgcggagtaatgcacataatggttatttaaataaaccacatgaatcattaatgggttattcattatttttgtgatttactcacaatgtatcagggaaatataacttaccgggagatgtaatatgtttaatttttcaaatcgaaatttaaaatattgtgccggaggcatctctggcacattgggcaattacggca

SEQ ID NO: 15 - DNA, 114 bp, Escherichia coli
cgatgttctgaatctgctcgcgcatctgctcaatcaacactttcagctcgatggcggagtttgtcacttcggcattgatagacttcgacgcaagagtgttcgactcgcggttga

SEQ ID NO: 16 - DNA, 290 bp, Escherichia coli
acgggaagtaattgtaacttagtttgtaaaggtcatatgcttgttgatatttctttttgggctgacatactgatgcaaaatcttttagatactcatgattttcgaacgcataaatgcacaagaatttataataaatttctgcgtccgttatattacccttttcatggtagtcgaatgcatatgcatatattctatcaaggatatcaggagttaaaccatgtagtaatgccagattttctcctttcgataatgcgtgttttagttgatttgcccattcatcactattattg

SEQ ID NO: 17 - DNA, 444 bp, Escherichia coli
  misc_feature (1)...(444): n = A,T,C or G
acgggaagtaattgtaacttagtttgtaaaggtcatatgcttgttgatatttctttttgggctgacatactgatgcaaaatcttttagatactcatgattttcgaacgcataaatgcacaagaatttataataaatttctgcgtccgttatattacccttttcatggtagtcgaatgcatatgcatatattctatcaaggatatcaggagttaaaccatgtagtaatgccagattttctcctttcgataatgcgtgttttagttgatttgcccattcatcactattantgaatatttcaattgtttctgtgctcataatattcctctgngatgtgnctcgngatgccnaacnattatttgantgactcatngnnattnttatatnnatccnntnntaantnatnantntnaagccngcnttgcttatggnntantntnatttat

SEQ ID NO: 18 - DNA, 250 bp, Escherichia coli
cgctggaaaaaacctaaaatattcatcttattccccctacgagaaccctatttggctcgtttcaagccgtatttttattttgctgcaaattgtactgccgatgttctgtaatcagattgttagatcatctgctacagagtgtgtgaaaatttaattcgtatcgcaaattaaacgcgtgtcttttgtgagttttgtcaccaaatatcgttattatcactcccttttactggctaaaccagaaaacttattt

SEQ ID NO: 19 - DNA, 237 bp, Escherichia coli
gtattacaacaagaatacagtgctaaaaaaagaatgtacctgaagatagtcttcatttttactccaatgtttctttattgttatggtttgcgctgtttttgtttgttattcgtagtaaatatccactaacacatggctcataagttgaccagatgtaacactcaatgcaggatcgattttttgcattcgggtgctaaatttccaggatgaaccattcatgtcatccgacattactgg

SEQ ID NO: 20 - DNA, 237 bp, Escherichia coli
catcatcacagcggcagccatgtacagcagatccatattcaggttttccatgacagtctccagtttgtttcagttaaaacgtagtagtgttggtaaattaatgttcttcagacgccatcgacagatagacgatcgtcagaaccatgaagatgaaggcttgcagcgtaatgatcaggatgtggaaaatggcccacggcacattcaggatccactgtgaccaccacggcaacagaccag

SEQ ID NO: 21 - DNA, 139 bp, Escherichia coli
cccgcgacgttatccgcgtgtaggcatcgtcatgacgtaaacggcgatcggcggtataacggttgatcatcgaatccatgttgccagcagtaacaccgaaaaacagattcggtttacccagacgcataaagtcgtcttt

SEQ ID NO: 22 - DNA, 211 bp, Escherichia coli
ggagagcgaagggctatccggccagggtgaaattatcgccgcgaacgcacaatttgatatcgacgagtaaagtactcaaacggcgcgctccacacatgcaccagtcgggtgaacgggaagagcaggaagatggtcattcccaacaccagatgcaggcggaagacgaacgctacgccgttgagcatctctgacgatccaccacggaaagtga

SEQ ID NO: 23 - DNA, 154 bp, Escherichia coli
cacgacggattttcgctgccatgattcgctccttagagtacttctggtgccagagagataattttcatgaacttctcactacgaagctcacgagttacccggcccaaaaatacgcgtaccgataggctgctcgctgttgttgttcagaagaaca

SEQ ID NO: 24 - DNA, 160 bp, Escherichia coli
acttcgtcatcacgacggattttcgctgccatgattcgctccttagagtacttctggtgccagagagataattttcatgaacttctcactacgaagctcacgagttaccggcccaaaaatacgcgtaccgataggctgctcgctgttgttgttcagaaga

SEQ ID NO: 25 - DNA, 244 bp, Escherichia coli
aatgaccttgccggaagacaggacattcttaactttaccgcgtttacctttatctttaccggttaacacgataacttcgtcatcacgacggattttcgctgccatgattcgctccttagagtacttctggtgccagagagataattttcatgaacttctcactacgaagctcacgagttaccggcccaaaaatacgcgtaccgataggctgctcgctgttgttgttcagaagaacacaagcatt

SEQ ID NO: 26 - DNA, 108 bp, Escherichia coli
tgttcgatctcgaaacttacacctttctcagccagcacaatgcggacctgatggctatagatgtcagtaggaccggaaaacagcgtcattacccgaacgtttgttggc

SEQ ID NO: 27 - DNA, 369 bp, Escherichia coli
  misc_feature (1)...(369): n = A,T,C or G
tccagacgctctttcttggcgtcgtagtcaaagataccccctaagaacgtcggagcgttccgtgagtcctgaatgcgattatttaccggattaatttcaaacatggtctgatttcttttattgagctagtcaaaatgcggtgataagagcgggattgtacccaatccacgctcttttttatagagaagatgacgctaaattggccagatattgtcgatgataatttgcaggctgcggttccacgaaactcgttgatatcgagcttataagccagttgcacttngcgcacccgttatccggccagagggcggtatcgacattaaaagcaataccatccagcagtggaccgccgcccgaccggttcgacca

SEQ ID NO: 28 - DNA, 457 bp, Escherichia coli
  misc_feature (1)...(457): n = A,T,C or G
accccctaagaacgtcggagcgttccgtgaggtcctgaatgcgattatttaccggattaatttcaaacatggtctgatttcttttattgagctagtcaaaatgcggtgataagagcgggattgtacccaatccacgctcttttttatagagaagatgacgctaaattggccagatattgtcgatgataatttgcaggctgcggttgccgcgaaactcgttgatatcgagcttataagccagttgcacttcgcgcacgccgttatccggccagagggcggtatcgacattaaaagcaataccatccagcagtggaccgccgccgaccggttcgaccatnaccttcaaatgacgttcgcccaccagccgctgttgcancagacggaaatgaccgtcaaacagcggctccgggaacatctgcccccacgggccagcatcgcgcagcagctgcgccacttc

SEQ ID NO: 29 - DNA, 729 bp, Escherichia coli
  misc_feature (1)...(729): n = A,T,C or G
ctttttacggacaaacaatcatgcaaccagaagttgaagtattaaccgatcataatgagctaatttgttcgagctttattgaacacattgccaacacattaaatttaggagtggtgtacaactaaacctgcagccaaggatgtatagtgagcgaagccctatcaggcctttttggtcagtagataagattgatcttcgttgatagaatttacttacaccagctgttacattaagataattttttggtgggagaatgataagatcttacgtaacaatttgattttaatggtgccgataataggagtcgaacctacgaccttcgcattacgaatgcgctgctctaccaactgagctatatcggccctgaaaggacatgttcacgaacgtgaatcacggtggacaaggttaaaactaaccgggcgatgcgtcaatggccttgtgaatcaaatggctacttttgcatcacccggttttatttacgcacgaatggtgtaatcaccaatgccgatccacttgtaagtggtcaagtgcttncagccccattgggccacgcgccgtggagtttttgtgtgcttaccggcactttcgcacccagaccaaactggccgccgtcggtaaaacgcgtagaggcgttacgtaaacagcggacgaatccacttcgtnacaaaacgcttggcgttggcatatcgcgggtcangatcgcaatcggagtgttgtgtgcccgggttn

SEQ ID NO: 30 - DNA, 305 bp, Escherichia coli
agccattgtccggagaattttcgtctttctcgagggtattatctgaaagtaactcttctgagctagagtcttctatgtttaaatccatagtataattaatttgggggacgaccagataagcattttctttggtattttcataatcttcaatgattatatccgatgtaatcatatattttttctgatgagaattctttcatctctgttaatttaattctgttcaagcaattgatgattttcgatgagcttttatatatttcttttgttaattcattttctaatttatctgtaagagttgcccttgg

SEQ ID NO: 31 - DNA, 425 bp, Escherichia coli
aggttactggcgaggttatcgagaaacgccagactgatacccataaaaaagagaataaggtaaaccatccagcttaatagctgattaataacttttaacgcagcttgttggcgaagcggaatgaggtaacccacaatcaggggaaccagaatgattaacagcccagaaaacatgaaaacccagtccttgcaaagatgaagtcgaaatgcgcgatgacacactactgaaagcggaaggacgagtaaagttgcaattaaaaggaaatgttatgcataaggagcagtagagtattcgttttcatttaaagatattcttgcgctttaattacaaactgcaccgatgttggtggcgtcaaaatcgccgaggcgttccctgaaggccggggcagcccacatggatgtgggctgagggcgcgttttacaggg

SEQ ID NO: 32 - DNA, 381 bp, Escherichia coli
aaaagagaataaggtaaaccatccagcttaatagctgattaataacttttaacgcagcttgttggcgaagcggaatgaggtaacccacaatcaggggaaccagaatgattaacagcccagaaaacatgaaaacccagtccttgcaaagatgaagtcgaaatgcgcgatgacacactactgaaagcggaaggacgagtaaagttgcaattaaaaggaaatgttatgcataaggagcagtagagtattcgttttcatttaaagatattcttgcgctttaattacaaactgcaccgatgttggtggcgtcaaaatcgccgaggcgttccctgaaggccggggcagcccacatggatgtgggctgagggcgcgttttacagggat

SEQ ID NO: 33 - DNA, 329 bp, Escherichia coli
  misc_feature (1)...(329): n = A,T,C or G
gtcgatgttgtgcccgaacttgccatgctccagtccttttcttctgggccgactttccgggaggtgcttaaacgaaaaaccccgcccggtttgcgccggcggggttttggaatcgtgtgttgttccagtccctacggcgcattgccgacgaccaccaccacacgcacgacgaccactgcggcggatgggcgcagttggtagtagttttgcgttgagcatggaagtagtcattggggaccttgttggttttgtgtttaacaatatttatacaagcacagctttacaggggagacaatggaaaatttttcagcaagggaaaattgaggggn

SEQ ID NO: 34 - DNA, 442 bp, Escherichia coli
gatgttgtgcccgaacttgccatgctccagtccttttcttctgggccgactttccgggaggtgcttaaacgaaaaaccccgcccggtttgcgccggcggggttttggaatcgtgtgttgttccagtccctacggcgcattgccgacgaccaccaccacacgcacgacgaccactgcggcggatggcgcagttggtagtagttttgcgttgagcatggaagtagtcattggggaccttgttggttttgtgtttaacaatatttatacaagcacagctttacaggggagacaatggaaaatttttcagcaagggaaaattgaggggttgatcacgttttgtactgaattgcagataacaaaaaaccccgccggagcgaggtttcgtcagtcgcctgcggctggtaaccgcaaagcacactgtattatgtcaacactgaaagtat

SEQ ID NO: 35 - DNA, 272 bp, Escherichia coli
cgattatagggctgaccaaatacatggatagataatatgccatccccccaggcagtccacgtaaaaagagcatatacaaggagaatagaacacctacagctgtaataagataaacataatgttttactctattaacacctacgatgaatgcataagagatgataaccataaagacaatttgcttaccagtattcagtataattgcaaagatgaatacaataaaaacaagtaaagtaaatgttttacttacctttgtattagtaaatttttta

SEQ ID NO: 36 - DNA, 255 bp, Escherichia coli
tgcgattacggcatgcttatgatcaggaatgttaatgcctgctatacgggccactatgcactcctactatttaatatgtacgttccatgctgaaaagcccgttttcaggatactcaaatggaaacgcacagacatacaaaagattggctggctaatctagccagctcaacccaactttgcaagaaaaatatgcgaaaaaatcagccttggcgctgtttatgcttcggctcggcactgcaaatcacacggatgaca

SEQ ID NO: 37 - DNA, 389 bp, Escherichia coli
aacgtaaaactttacgtaaattaacatggttaacatttatgccactattgtttgtaaattcatatttcgtaatgcttctgaatttttcgtgtgatggttttaaatactatggtgtttactcttgaggggacggcctatttataaaatacggacatttcaataaatgcccgtataaacagagtatgattctggctggtcgttgagtatcaatgttggaccgaatgtgaacgaataaataattcgtttattttaccacccattctcttttcgattcgttgcttgtacgcgtagatgctacggatatccatatccagaacttcagcaatctgatatggattataaccagaaaccatataccccattatggtgaattccatctgagttaatgt

SEQ ID NO: 38 - DNA, 178 bp, Escherichia coli
gtggttaggatctttatagttacgctcggcggcatccatcgggatacctgcggcattttctttggcaaaaccgatttcagaattgtgtttgtttggatgaacctgaatggagagtggctgtgctgcgcataatactttgaacaggaaaggcagttcgccaaagcgtttggcaacggcc

SEQ ID NO: 39 - DNA, 191 bp, Escherichia coli
tcgcaaggaaaggcgtcagcgcaaaaaccagctccggcttgtggttaggatctttatagttacgctcggcggcatccatcgggatacctgcggcattttctttggcaaaaccgatttcagaattgtgtttgtttggatgaacctgaatggagagtggctgtgctgcgcataatactttgaacaggaaaggc

SEQ ID NO: 40 - DNA, 158 bp, Escherichia coli
ccggcttgtggttaggatctttatagttacgctcggcggcatccatcgggatacctgcggcattttctttggcaaaaccgatttcagaattgtgtttgtttggatgaacctgaatggagagtggctgtgctgcgcataatactttgaacagaaaaggc

SEQ ID NO: 41 - DNA, 184 bp, Escherichia coli
tcgaagaatttaacggagggtaaaaaaaccgacgcacactggcgtcggctctggcaggatgtttcgtaattagatagccaccggcgctttaatgcccggatgcggatcgtagccttcaatctcaaagtcttcgaaacggtagtcgaagatggattcgggtttacgtttgataatcaacttcggc

SEQ ID NO: 42 - DNA, 122 bp, Escherichia coli
gtagaagttcaaattacgaacctgaattttactcggggcagtttcaaccatactcattgcaatcttttcctcatcgtgcctgatgcacttcgctaatcaggcttaccgtaggccggatcagg

SEQ ID NO: 43 - DNA, 163 bp, Escherichia coli
taaattccgcgtatagcgtgggcgctttggctccggtcgcttcgacgaggtccgcaagagaagtcgcttcataaccgtgttgccagaacaatttcatggccttatcaagcgcggcatccctgtcgaacacttttgggcggccacggcttttttttacacattg

SEQ ID NO: 44 - DNA, 161 bp, Escherichia coli
gcaaatgttttcgtaattcaggagaaatggcaaataaagcattaaaaatttgaatgctttgtgtaataaaaaagcagacaggcgacggagtgaccactccgtcgctttacaaagagaggaaaatcataggttgccggtgtagtgccagcgtaaataacgca

SEQ ID NO: 45 - DNA, 251 bp, Escherichia coli
ggctgtaacggtaaagccctcaccgaagcgagggcttgaaggagaagggttatgatgcgacttgtcatcatactgattgtactgttactcataagtttcagcgcttattaacagtcagtctcaggggaggagcaatcctcccttacccttactcactaaattaggtcaaagaatcaacgatgtcaatcagggcgatgcggttgtatcgcccttaccactcccagactttcgacggtgtaaccaccgcagga

SEQ ID NO: 46 - DNA, 286 bp, Escherichia coli
caccgaagcgagggcttgaaggagaagggttatgatgcgacttgtcatcatactgattgtactgttactcataagtttcagcgcttattaacagtcagtctcaggggaggagcaatcctcccttacccttactcactaaattaggtcaaagaatcaacgatgtcaatcagggcgatgcgggtgtatcgcccttaccactcccagactttcgacggtgtaaccaccgcaggaagagggatatcccactcttcaacggggagtttttccaccaactgacaatcatgcg

SEQ ID NO: 47 - DNA, 180 bp, Escherichia coli
ccggggctgacgtgggcgataatcgggtcgccaggaatagggcggcagcatttcgcaaaggtgatcagcacgccatcggcacctttaatgggcagatgtccgtggctttgggttgccggtggaatggaggcgtccccatgttgcagatttttcgcgaccaccacgctcattgcgttacca

SEQ ID NO: 48 - DNA, 254 bp, Escherichia coli
tgtcgagcatacgcggcagcgccgactcggaagatgaagtccccagtacaatcagcagttcttcacggatgtagcggataaatttgaagatactgaaaccagtcgctttagcgattgaacccaataccagcaccacaaacaggatacaggtaatgtagaaacagataatcagctgccccagttgcaccagtgtgccgacgccgtatttaccgatggtaaacgccattgccccgaacgcaccaataggtgccaga

SEQ ID NO: 49 - DNA, 300 bp, Escherichia coli
  misc_feature (1)...(300): n = A,T,C or G
agctgatcgatggtgtttgccaacgcacacgccaccgcggcggcggcaaacaccancgtaccgccgagcaccaccggcttacgcccgaagctgtctgccatcggcccgtagattaactgccccaacgcaaagcccagaatataagtactgagggtcatctgcgtactgcccgncggtacgccaaactgcgctgaaattaccggtagcgcgggcagatacatatcaatcgacagcggcatcaacatggccagcaggccaaggataaaaacaatagcaaacgacgaatgctgtcgggtggtc

SEQ ID NO: 50 - DNA, 207 bp, Escherichia coli
caacatctcatgtctggatttgtagatatacgtggaattccaattggtatcttttgtaggattcaacatatcatgtaagcgctgggagcttaccaccataactggcccatcatcgactgaggagaacaggataaagatattatcgtttcgtgttaattcattcgtgttaaaggttcttaaattatcttcagtttctataaatatagg

SEQ ID NO: 51 - DNA, 213 bp, Escherichia coli
ttctgtaatcagaaaaagaagaactggaattttaataaatattatttctctgggaacgggggggtataatcaatatgacgagttgaatattatattttttataagaattatatgagattaaagaaatctgccgtaaagacagatttctttaaaagataattagagatttgcgacgttatgataaactttttgtacatcgtcgtcatcttcaag

SEQ ID NO: 52 - DNA, 381 bp, Escherichia coli
tctgttagtgtattatccactgcggccctttccgccgtctcgcaaacgggcgctggctttaggaaaggatgttccgtggccgtaaatgcaggtgtttcacagcgcttgctatcgcggcaatatcgccagtggtgctgtcgtgatgcggtcttcgcatggaccgcacaatgaagatacggtgcttttgtatcgtacttattgtttctggtgcgctgttaaccgaggtaaataataaccggagtctctccggcgacaatttactggtggttaacaaccttcagagcagcaagtaagcccgaatgccgccctttgggcggcatattttagattatccgattctgtttaaagtcacgcaaaaaaccaccccagcgacgttcatag

SEQ ID NO: 53 - DNA, 154 bp, Escherichia coli
aaatagaccggcatactttcgtgcggcagcataatcaacagtacgagcgcagcggtactaatgataaaggtgtagcatagatatttacttggcgatttcaggatcttatctgaaatcatgccaccaatcggtccaccaatcattttcagacagt

SEQ ID NO: 54 - DNA, 191 bp, Escherichia coli
tccttagtcaggtactgacgtactttaaaatcgctgtccaggttgtcagcgaattctttggtgttcgcaaaccaggtagagttccatggttttacaatacccaggcgaataccattaggatgtactttctgacccattgctagtctccagagtctcagcgatcggacacaaccacagtgatgtggctggtg

SEQ ID NO: 55 - DNA, 190 bp, Escherichia coli
gctggtgcccgttttccatgccagtggggcgacgcgcggcaaggcactatccggcaagggttgcgcttcatcagccataatccggcgaatgatccacgccgcccccgacgacattaaaggccgttcaagcagcggatcgtcaggctgtaagcgcaatttgcctgccttgccgtggcgagcaaacgcggta

SEQ ID NO: 56 - DNA, 402 bp, Escherichia coli
aaaaaatgaaattcctctttgacgggccaatagcgatattggccatttttttagcgcaacatttgcggcaaattcccttctccatacaggtgtagtgcaccgaccgcgaccacatatcgccccggcggcatggcgcgtaatttatcccgccaggcgagatttcgctgatgcatcagcacatcgtacagcgactgactgaacgtattgggcagcgttatatcattattttgcggcggtgcattcagccaccagctcatcatttgttgcagcaaccgtgcgttggtatgccagtgggtcagcgtatcgtccagcagcgccagtcctttgtcagggagctggagcaacatggcaatctggttttcagccccttccagttcaatcacgggtttatgttgttgcttc

SEQ ID NO: 57 - DNA, 595 bp, Escherichia coli
  misc_feature (1)...(595): n = A,T,C or G
aattaatcagagcaacggtaaaacaatgaaagtgtaaaaaacacttttgcgccaattatggagaaaaaaagaaaatttgatggagagtgatgagagaatattacaacacgatgattttgcagagattatgaagaactataccggatgactggtgataaataaagcaaataaccaggattaatctgtattaatttataagaaagcaacttaatacccgcagaatgatttctgcgggtaagtattagcttattttttcgagcattaatcccgcgcgtaatcccaacgctaccaacggattagggaataacacatactctacatcatgggttacggtaaaacgttcctctccgtcctgcgccagcaatgttcctttctcaaacggcataaaattcagcgtgtcacttgccatatgcatttcgaaggacggcgagtggcgagtaatttgcgaaaccacccgataacggagcggcggtgttctcacgataccgacactctcaccagatagcagcgcagcaattgcgctggcagttactgcaaactggcgaagatcgttttgcccaaagggcaacgctttgccaagttncagccgtacang

SEQ ID NO: 58 - DNA, 250 bp, Escherichia coli
gaaactcagtggaatgggggagccgcaatagcgaacatgttccatgccgccaataatctgtgcgcggtgaatatgcccgagcgcgatgtagtcggctggtggaaagttttgtgccggaaacgcgtccagcgtgccaatataaatgtcacgcacggcgtcacttttactggcccccacggtcgttaaatgtcccgtggcgatgatgggcagaggctgatcgccgcgcagtttgcaggcatcggcatagtgt

SEQ ID NO: 59 - DNA, 236 bp, Escherichia coli
aaaggttcggcaaaagccataaccttttcgtcagctttggccggataagggacacattgcgacgtttcgaccattttataacgggtaaaaccaccatcaacatgagggaaatacatggcactgccaaaaaaacgcatatctgtacactgattctcgttatgttcaatgcagtatttgcagtgaccgcacggtttagacggattaatggctaccgtttgcccttcatgtaattctga

SEQ ID NO: 60 - DNA, 92 bp, Escherichia coli
gaagagatgttcaggttttcgttatcggcaatggtatcgaacttgtatttctcatacttctcgtcaggcgtggagtacgccgcgccacggaa

SEQ ID NO: 61 - DNA, 62 bp, Escherichia coli
tgtcgacattcagcacttccgggtattcgtcgcgcagggcaaatgtacaggttgaggaggtg

SEQ ID NO: 62 - DNA, 72 bp, Escherichia coli
acttatcaaaccatttttccgcttcaccggaggtctgcacctgagcgatggtgtcatccatcagctttttga

SEQ ID NO: 63 - DNA, 66 bp, Escherichia coli
aaacgcatggcgcgtaaaggttcaatcagtccgatttcagcggtgtcgaactcgctaaattcttca

SEQ ID NO: 64 - DNA, 143 bp, Escherichia coli
  misc_feature (1)...(143): n = A,T,C or G
tataggggnctatttcattaacccgacactggattaattcaacaggaatattatgattctgacacaactctttaatttcttccgccgccatcgtagaggtcgcaaccgcgcctccgcaagcgacaataatcttgcgtttcata

SEQ ID NO: 65 - DNA, 210 bp, Escherichia coli
gaggaaccgtgtgacacacaaagggtgattattttccattgcggcgtataatcctggctcaccatcatgtattttcatggctaaaatactcatcaccagttttttgtttaaaagctcttgtgctattggagtggttaatgcattcagaaagatatcgattatttcatcgaatccatacaacatggagatataaagtccaggtgtttcgtt

SEQ ID NO: 66 - DNA, 118 bp, Escherichia coli
agagctgtgaaggagaaaatacgaccacctttaacggttttagatacgcggtttaccgcgatcagcttttcctgcagttcgccagcttgtttttcgatgtgagccatcttacacctct

SEQ ID NO: 67 - DNA, 531 bp, Escherichia coli
  misc_feature (1)...(531): n = A,T,C or G
cctttcaacgcagtagaggggaatgncncctacggcatcggcaccgcgctcaatttctgccagcatatagcccattccgtcttgatcgggcggaacataggtgtcggcatcacttaaaaaaacctggtcgcaggtggcgtaattgaggccattcatcagcgcaccacctttaccggtatttttttgcgtgacggcaacaaagcggtcgccccatttgcgtttgacttccgccatgaccgcttcggtattgtccgtggagccgtcgttaacgcaaattacccggcaaaaataangggttcgcagtaanttatccagtgactggcgccagacacgggccttttttntncgcagntttaatggcgtcnaatacagcctttttttttantgggtttaccntntanccgtntttaaaaacccatagcaaccattgttttngaccttcanaatnaaaaattcngggttttaaaagcgcgttttccggcaacttgntggacagggcaaaaaattcctgcctgggtcgccgnatctgng

SEQ ID NO: 68 - DNA, 102 bp, Escherichia coli
agcgccggtaacgcccgttaaatgttctcgttcggcttcccgatcgttattcaacaggctgcgtaccgtagcggcatatttcttccctgcttcatcgccatc

SEQ ID NO: 69 - DNA, 167 bp, Escherichia coli
aaaactcaccttttttgttgttatccctcaattaccacaagtaaaaggagataaaccgacaatgacctagacgtaattatgtaaaaatactgatgttcgtcactgactatttccgatattcagctgttgaaaaatcaaaaaactggaaaaataattttaaatatcat

SEQ ID NO: 70 - DNA, 83 bp, Escherichia coli
gccacgcccagcataaacagcgggatcgagccttcaatcggtacgcccagtacacctttcaccatcagcaccagcgataatcc

SEQ ID NO: 71 - DNA, 103 bp, Escherichia coli
  misc_feature (1)...(103): n = A,T,C or G
gccnggcgggaaccgacatgttcccactctacgccggctggcgcggttttcatttttgcgcacctgatagccgcacgattgcagatcaacaacgccttttttg

SEQ ID NO: 72 - DNA, 121 bp, Escherichia coli
tagcttcttccacattgtcgaactgaacgtccagacggtgtttagaaacgttgatgctcgggattttttccgcacccaggcaaacgcgcgccatggctgcaacggtttctgacggatactg

SEQ ID NO: 73 - DNA, 163 bp, Escherichia coli
tagttattggctgttttgagaatgtaatcttccaactgcttataactcttcagatgcaataatccgagaatcacatgcaatttattcataaattcgtgggatcgttcacgaagtgcgtcagcatagttgaccagaccgtcgagtcgctgcatcagtttacgta

SEQ ID NO: 74 - DNA, 106 bp, Escherichia coli
aaaaccatgaggttattatggccgatttgaggagggaaagagtaagagcagtttgttaaatgtacaacgacgattctcccaccgggcgcgttttaaagcgacggtg

SEQ ID NO: 75 - DNA, 319 bp, Escherichia coli
ctggagattgagtagatattcttgttcagaatgtatcagcccgatggttctacgattcttaagccacgaagagttcagatagtacaacggcatgtctcttttgactatctggcaacccggcagtgtgttctctcacgcatcacaaaagcagcaggcataaaaaaacccgcttgcgcggctttttcacaaagcttcagcaaattggcgattaagccagtttgttgatctgtgcagtcaggttagccttatgacgtgcagctttgtttttgtggatcaaacctttagcagcctgacggtccacgatcggttgcatttcgtt

SEQ ID NO: 76 - DNA, 237 bp, Escherichia coli
cgaaccaacgacccccaccatgtcaaggtggtgctctaaccaactgagctatgaacgcaacgttgtaggtgacaacggggacgaatattagcggcagagtgggaaggtggcaagaggcaaaacgtaattttctgcgctatttcgaccgtttgcagagcttttaagcaaattggctatattttgttgatttgcaagggtgatttttattcaggatcgcatttacatctgatacaaccc

SEQ ID NO: 77 - DNA, 241 bp, Escherichia coli
tgtgacagagtggttatcgttaatcaggcaaagagggaaaaacatattatttaaaccattatagcgcataaaatatccttataattaacaagaaagaaaaggcatattctctgcattatcattttctacgactgtcaaaaatcgctcattttttaatgagtttatttgtttaatattatgggaaaaggtgatgcatttgggagaggaagagtattccccggtcagacgaccggggaagggg

SEQ ID NO: 78 - DNA, 89 bp, Escherichia coli
cccggctgggttttttcaagtttacgcaggggtgcgggcgatcacttccgggttgctggcagcttcgcctttcggcgaaatgctgtggt

SEQ ID NO: 79 - DNA, 140 bp, Escherichia coli
tcgcgaacaccgtagtggatgtagttacccgcagcatcttcgttgattgctttagaaccagaccacagggtcaggttagacggcgccaggtcagcagaaccgccgaggaattccggcaacagcggaccgaacgcttcgat

SEQ ID NO: 80 - DNA, 189 bp, Escherichia coli
gttagtaaagccgatgaggtgagcagtcacttcgccggacggatagtaacggcgagactcttcacgcagatgaatccccggcagtttcagttttttgatgtagtccgccatgtcagggttcacctgacgcgccagataaataaagcgccctttcgggttggcgttaatgcgggctgaaagctgatccag

SEQ ID NO: 81 - DNA, 347 bp, Escherichia coli
gcagttcaccggcacgcgctttcttatataagcctttgggatcgcgggcttcgcaaatcgccagcggcgtatcgacaaacacttcgataaagcgcccttctcctacgcgttcgcgaaccatctggcgttcggcgcggtgtggcgagataaatgcggtcagcaccaccagtccggcttcaaccatcaaattcgccacttcaccgacgcgacggatattctctttacgatcggcatcgctaaaaccgagatcgctgcataatccgtggcgaacattgtcgccatccagcagatacgtactgacgccgagtttatgtaacgcctcctccagcgccccggcgaccgttgat

SEQ ID NO: 82 - DNA, 67 bp, Escherichia coli
ccctgacgatcagtgatagtcacgatggtgttgttgaaagaagcatggatatgagccacgccgtcag

SEQ ID NO: 83 - DNA, 176 bp, Escherichia coli
agcaaagcgagccgaacatggtggcgaggctgccgtaaagtaaaaactgggtcgccaactccgggtgatccatcacgtatttcacgaagtagagcgtcgccccgccgcgcaccacgttggagcaggtcgccatcatcttgaacgcgcacatgatgcgccactggctgttgcccagc

SEQ ID NO: 84 - DNA, 632 bp, Escherichia coli
  misc_feature (1)...(632): n = A,T,C or G
tnncannnncnnnnnnnnnnnnnnnncncnntncctagantntcnangtctncncncncntnnccnnncccttcnnnnccnnnnanangnncnncncccccnnncccnnttttgttttggaaantccgtttcaggaanagcttctgaatcccgancgnttgataactgnnggccagagtcataatgcgcaccaataataatcagcggnccatcggcaggaccataatcagcaacaatgnnnnggtaggggccacccgtaatggggaccgtcctgcgaggtaactctggcaccgctactgacaaagacctcttttatatattctgcgggacctattcagattatcaatattgtcnggcactacgtggatgcacaagtttgtgtaagataacgaactgntttttctaattgctcaggactttgcgtgtcggggccgttgacggtaatgcattgacccagggttggtaaaaaataatcatagggagtaaaaacacaaataatataataaaagccaagattatttttttcatatgcaaaattattaatggggttgcgtttggtgaatcattatnttgctatgggtttcgatattgngattttaattaaagattaagcangggattataccaaaaga

SEQ ID NO: 85 - DNA, 161 bp, Escherichia coli
gcgctattcagcgtaattggcagcagctgcggatcgtcatcaatcttctctgacagcggctgatgtacttcaaccagacgcgcaccgtttggttcggcagagacttttatcggagtgttgatgatattcactttggtgcctggggtgacctggctaaagag

SEQ ID NO: 86 - DNA, 188 bp, Escherichia coli
caagggtgagcatttgcagcgaatcagaaagggcgcagaacagtgaagacaacagaaaaacgaccagaccgcatttataaatacgtcgatagccaaacatatcgcccagaaacgaaaacgagagcagggagatgacaatggcgatttgataggcgttcactacccagatggaactggctggcgtggca

SEQ ID NO: 87 - DNA, 175 bp, Escherichia coli
tgagcatttgcagcgaatcagaaagggcgcagaacagtgaagacaacagaaaaacgaccagaccgcatttataaatacgtcgatagccaaacatatcgcccagaaacgaaaacgagagcagggagatgacaatggcgatttgataggcgttcactacccagatggaactggctgg

SEQ ID NO: 88 - DNA, 194 bp, Escherichia coli
cgcaagggtgagcatttgcagcgaatcagaaagggcgcagaacagtgaagacaacagaaaaacgaccagaccgcatttataaatacgtcgatagccaaacatatcgcccagaaacgaaaacgagagcagggagatgacaatggcgatttgataggcgttcactacccagatggaactggctggcgtggcatgaa

SEQ ID NO: 89 - DNA, 272 bp, Escherichia coli
ccttgtataaggaaagggttatgatgaagctcgtcatcatactggttgtgttgttactgttaagtttcccgacttactaacaactcatcagaggggggagaaatcctcccttacccttgttcctttactctaggttgaaaaaacaacagcgtcaataggcctgccatgtacgaagcgagatctgtgaaccgctttccggttagccttttttatcctgttggatcttcttgatgatgttggtcgtcgagcaaccgtcttcaaagttgagcacc

SEQ ID NO: 90 - DNA, 245 bp, Escherichia coli
ccttgtataaggaaagggttatgatgaagctcgtcatcatactggttgtgttgttactgttaagtttcccgacttactaacaactcatcagaggggggagaaatcctcccttacccttgttcctttactctaggttgaaaaaacaacagcgtcaataggcctgccatgtacgaagcgagatctgtgaaccgctttccggttagccttttttatcctgttggatcttcttgatgatgttggtcgtc

SEQ ID NO: 91 - DNA, 203 bp, Escherichia coli
taccaaaaaaagccacgttatcttgttgatgcaaaagagtgaacgtggcgttaaatgtaaccagttatatcagtagaaaacctggttgttgttaacagtctaaccggtcaattttttatgatttttttgataaaaattaaattttatttgctttaatcaccaccagatgacgttcgccatccagggctggaacctgaagttta

SEQ ID NO: 92 - DNA, 189 bp, Escherichia coli
  misc_feature (1)...(189): n = A,T,C or G
ctaatgacttattttctgcttaccaaaaaaagccacgttatcttgttgatgcnaaagagtgaacgtggcgttaaatgtaccagttatatcagtagaaaacctggttgntgntaacagtctaaccggcaattttttatgatttttttgataaaaattaaattttatttgctttaatcaccaccagatgac

SEQ ID NO: 93 - DNA, 221 bp, Escherichia coli
agcgcaacagcggaaaccagggtagccagttttttcatgttcatattcaagatgtcctgtagtcgttattactgctttttgttgtctaccagcaccgccagcaaaatcaccaccgctttgacgatcatctggtaataggaggaaacacctaacaaattcaatccattattaaggaagccaagaattaatgcgccgatcaacgtcccaacaatgcgaccttt

SEQ ID NO: 94 - DNA, 117 bp, Escherichia coli
  CDS (1)...(117)
atgaaagttcgtgcttccgtcaagaaattatgccgtaactgcaaaatcgttaagcgtgatggtgtcatccgtgtgatttgcagtgccgagccgaagcataaacagcgccaaggctga

SEQ ID NO: 95 - DNA, 1332 bp, Escherichia coli
  CDS (1)...(1332)
atggctaaacaaccgggattagattttcaaagtgccaaaggtggcttaggcgagctgaaacgcagactgctgtttgttatcggtgcgctgattgtgttccgtattggctcttttattccgatccctggtattgatgccgctgtacttgccaaactgcttgagcaacagcgaggcaccatcattgagatgtttaacatgttctctggtggtgctctcagccgtgcttctatctttgctctggggatcatgccgtatatttcggcgtcgatcattatccagctgctgacggtggttcacccaacgttggcagaaattaagaaagaaggggagtctggtcgtcgtaagatcagccagtacacccgctacggtactctggtgctggcaatattccagtcgatcggtattgctaccggtctgccgaatatgcctggtatgcaaggcctggtgattaacccgggctttgcattctacttcaccgctgttgtaagtctggtcacaggaaccatgttcctgatgtggttgggcgaacagattactgaacgaggtatcggcaacggtatttcaatcattatcttcgccggtattgtcgcgggactcccgccagccattgcccatactatcgagcaagcgcgtcaaggcgacctgcacttcctcgtgttgctgttggttgcagtattagtatttgcagtgacgttctttgttgtatttgttgagcgtggtcaacgccgcattgtggtaaactacgcgaaacgtcagcaaggtcgtcgtgtctatgctgcacagagcacacatttaccgctgaaagtgaatatggcgggggtaatcccggcaatcttcgcttccagtattattctgttcccggcgaccatcgcgtcatggttcgggggcggtactggttggaactggctgacaacaatttcgctgtatttgcagcctgggcaaccgctttatgtgttactctatgcgtctgcaatcatcttcttctgtttcttctacacggcgttggttttcaacccgcgtgaaacagcagataacctgaagaagtccggtgcatttgtaccaggaattcgtccgggagagcaaacggcgaagtatatcgataaagtaatgacccgcctgaccctggttggtgcgctgtatattacctttatctgcctgatcccggagttcatgcgtgatgcaatgaaagtaccgttctacttcggtgggacctcactgcttatcgttgttgtcgtgattatggactttatggctcaagtgcaaactctgatgatgtccagtcagtatgagtctgcattgaagaaggcgaacctgaaaggctacggccgataa

SEQ ID NO: 96 - DNA, 435 bp, Escherichia coli
  CDS (1)...(435)
atgcgtttaaatactctgtctccggccgaaggctccaaaaaggcgggtaaacgcctgggtcgtggtatcggttctggcctcggtaaaaccggtggtcgtggtcacaaaggtcagaagtctcgttctggcggtggcgtacgtcgcggtttcgagggtggtcagatgcctctgtaccgtcgtctgccgaaattcggcttcacttctcgtaaagcagcgattacagccgaaattcgtctgtctgacctggctaaagtagaaggcggtgtagtagacctgaacacgctgaaagcggctaacattatcggtatccagatcgagttcgcgaaagtgatcctggctggcgaagtaacgactccggtaactgttcgtggcctgcgtgttactaaaggcgctcgtgctgctatcgaagctgctggcggtaaaatcgaggaataa

SEQ ID NO: 97 - DNA, 180 bp, Escherichia coli
  CDS (1)...(180)
atggcaaagactattaaaattactcaaacccgcagtgcaatcggtcgtctgccgaaacacaaggcaacgctgcttggcctgggtctgcgtcgtattggtcacaccgtagagcgcgaggatactcctgctattcgcggtatgatcaacgcggtttccttcatggttaaagttgaggagtaa

SEQ ID NO: 98 - DNA, 504 bp, Escherichia coli
  CDS (1)...(504)
atggctcacatcgaaaaacaagctggcgaactgcaggaaaagctgatcgcggtaaaccgcgtatctaaaaccgttaaaggtggtcgtattttctccttcacagctctgactgtagttggcgatggtaacggtcgcgttggttttggttacggtaaagcgcgtgaagttccagcagcgatccagaaagcgatggaaaaagcccgtcgcaatatgattaacgtcgcgctgaataacggcactctgcaacaccctgttaaaggtgttcacacgggttctcgcgtattcatgcagccggcttccgaaggtaccggtatcatcgccggtggtgcaatgcgcgccgttctggaagtcgctggggttcataacgttctggctaaagcctatggttccaccaacccgatcaacgtggttcgtgcaactattgatggcctggaaaatatgaattctccagaaatggtcgctgccaagcgtggtaaatccgttgaagaaattctggggaaataa

SEQ ID NO: 99 - DNA, 354 bp, Escherichia coli
  CDS (1)...(354)
atggataagaaatctgctcgtatccgtcgtgcgacccgcgcacgccgcaagctccaggagctgggcgcaactcgcctggtggtacatcgtaccccgcgtcacatttacgcacaggtaattgcaccgaacggttctgaagttctggtagctgcttctactgtagaaaaagctatcgctgaacaactgaagtacaccggtaacaaagacgcggctgcagctgtgggtaaagctgtcgctgaacgcgctctggaaaaaggcatcaaagatgtatcctttgaccgttccgggttccaatatcatggtcgtgtccaggcactggcagatgctgcccgtgaagctggccttcagttctaa

SEQ ID NO: 100 - DNA, 534 bp, Escherichia coli
  CDS (1)...(534)
atgtctcgtgttgctaaagcaccggtcgttgttcctgccggcgttgacgtaaaaatcaacggtcaggttattacgatcaaaggtaaaaacggcgagctgactcgtactctcaacgatgctgttgaagttaaacatgcagataataccctgaccttcggtccgcgtgatggttacgcagacggttgggcacaggctggtaccgcgcgtgccctgctgaactcaatggttatcggtgttaccgaaggcttcactaagaagctgcagctggttggtgtaggttaccgtgcagcggttaaaggcaatgtgattaacctgtctctgggtttctctcatcctgttgaccatcagctgcctgcgggtatcactgctgaatgtccgactcagactgaaatcgtgctgaaaggcgctgataagcaggtgatcggccaggttgcagcggatctgcgcgcctaccgtcgtcctgagccttataaaggcaagggtgttcgttacgccgacgaagtcgtgcgtaccaaagaggctaagaagaagtaa

SEQ ID NO: 101 - DNA, 393 bp, Escherichia coli
  CDS (1)...(393)
atgagcatgcaagatccgatcgcggatatgctgacccgtatccgtaacggtcaggccgcgaacaaagctgcggtcaccatgccttcctccaagctgaaagtggcaatcgccaacgtgctgaaggaagaaggttttattgaagattttaaagttgaaggcgacaccaagcctgaactggaacttactctgaagtatttccagggcaaagctgttgtagaaagcattcagcgtgtcagccgcccaggtctgcgcatctataaacgtaaagatgagctgccgaaagttatggcgggtctgggtatcgcagttgtttctacctctaaaggtgttatgactgatcgtgcagcgcgccaggctggtcttggtggcgaaattatctgctacgtagcctaa

SEQ ID NO: 102 - DNA, 306 bp, Escherichia coli
  CDS (1)...(306)
atggctaagcaatcaatgaaagcacgcgaagtaaaacgcgtagctttagctgataaatacttcgcgaaacgcgctgaactgaaagcgatcatctctgatgtgaacgcttccgacgaagatcgttggaacgctgttctcaagctgcagactctgccgcgtgattccagcccgtctcgtcagcgtaaccgctgccgtcaaacaggtcgtccgcatggtttcctgcggaagttcgggttgagccgtattaaggtccgtgaagccgctatgcgcggtgaaatcccgggtctgaaaaaggctagctggtaa

SEQ ID NO: 103 - DNA, 540 bp, Escherichia coli
  CDS (1)...(540)
atggcgaaactgcatgattactacaaagacgaagtagttaaaaaactcatgactgagtttaactacaattctgtcatgcaagtccctcgggtcgagaagatcaccctgaacatgggtgttggtgaagcgatcgctgacaaaaaactgctggataacgcagcagcagacctggcagcaatctccggtcaaaaaccgctgatcaccaaagcacgcaaatctgttgcaggcttcaaaatccgtcagggctatccgatcggctgtaaagtaactctgcgtggcgaacgcatgtgggagttctttgagcgcctgatcactattgctgtacctcgtatccgtgacttccgtggcctgtccgctaagtctttcgacggtcgtggtaactacagcatgggtgtccgtgagcagatcatcttcccagaaatcgactacgataaagtcgaccgcgttcgtggtttggatattaccattaccactactgcgaaatctgacgaagaaggccgcgctctgctggctgcctttgacttcccgttccgcaagtaa

SEQ ID NO: 104 - DNA, 315 bp, Escherichia coli
  CDS (1)...(315)
atggcagcgaaaatccgtcgtgatgacgaagttatcgtgttaaccggtaaagataaaggtaaacgcggtaaagttaagaatgtcctgtcttccggcaaggtcattgttgaaggtatcaacctggttaagaaacatcagaagccggttccggccctgaaccaaccgggtggcatcgttgaaaaagaagccgctattcaggtttccaacgtagcaatcttcaatgcggcaaccggcaaggctgaccgtgtaggctttagattcgaagacggtaaaaaagtccgtttcttcaagtctaacagcgaaactatcaagtaa

SEQ ID NO: 105 - DNA, 372 bp, Escherichia coli
  CDS (1)...(372)
atgatccaagaacagactatgctgaacgtcgccgacaactccggtgcacgtcgcgtaatgtgtatcaaggttctgggtggctcgcaccgtcgctacgcaggcgtaggcgacatcatcaagatcaccatcaaagaagcaattccgcgtggtaaggtcaaaaaaggtgatgtgctgaaggcggtagtggtgcgcaccaagaagggtgttcgtcgcccggacggttctgtcattcgcttcgatggtaatgcttgtgttcttctgaacaacaacagcgagcagcctatcggtacgcgtatttttgggccggtaactcgtgagcttcgtagtgagaagttcatgaaaattatctctctggcaccagaagtactctaa

SEQ ID NO: 106 - DNA, 1458 bp, Escherichia coli
  CDS (1)...(1458)
gtgggaatttattttactaattcagatgatcaaatttactttaaaaggagtgaagggatgtctgatataaaccatgcaggttctgaccttatatttgaactggaggatcgccctccctttcatcaggctctcgttggtgccattacccatctgttggcaattttcgttccgatggtaacccccgcgttaatcgtgggtgcggccttacagctttccgctgaaacaactgcctatcttgtttctatggcgatgatcgcctctggtattggtacctggttacaagtaaaccgctacggcatcgtcggttctggcctactctcaattcagtcagtcaatttttcatttgttacggtcatgattgcgctgggcagcagcatgaaaagcgacggttttcacgaagagttaatcatgtcgtcgcttctcggcgtctccttcgttggcgcatttctggttgtcggatcttcatttatcttgccctatttacgtcgggttattacgcctaccgtcagcggtattgtggtactgatgatcggcttaagcctgattaaagtcggcattatcgattttggtggaggatttgcagccaaaagcagcggtacgttcggcaattacgaacatctcggcgttggtttattggttttaattgtggtgatcggctttaactgctgtcgcagtccgttgctacgcatgggagggatcgccattgggctatgtgtcggctatatcgcatcgttatgcctgggcatggtggatttcagcagtatgcgcaatttgccgttaatcaccatcccgcatccgttcaaatacggctttagttttagcttccatcagttcctggtggttggcacgatttatctgcttagcgtgctggaagcagtcggcgatatcaccgccacggcaatggtttcccgccgccccattcagggggaagagtatcagtcccggctgaaaggcggcgtgctggcagatggtctggtttctgttatcgcctccgctgtcggttcattaccattaaccacgtttgcgcaaaataatggggttattcagatgactggcgtcgcttcacgttatgtcgggcgaaccatcgcggtaatgctggttatcctcggcttatttccgatgattggcggcttcttcacgaccattccctcggcagttctgggaggcgcaatgacgttgatgttttccatgattgccatcgcagggattcgcatcatcatcaccaacggtttaaagcgccgtgaaacacttattgtcgccacttctttaggtttagggcttggcgtctcctacgatcccgaaatttttaaaatattgccagcctctatttatgtattagttgaaaaccctatttgtgctggcgggttaactgcgattttattaaatattatcctccctggtggctaccgacaggaaaacgttctgcctggtattacctcagcggaagagatggattaa

SEQ ID NO: 107 - DNA, 1320 bp, Escherichia coli
  CDS (1)...(1320)
atgatgtcaggagaacacacgttaaaagcggtacgaggcagttttattgatgtcacccgtacgatcgataacccggaagagattgcctctgcgctgcggtttattgaggatggtttattactcattaaacagggaaaagtggaatggtttggcgaatgggaaaacggaaagcatcaaattcctgacaccattcgcgtgcgcgactatcgcggcaaactgatagtaccgggctttgtcgatacacatatccattatccgcaaagtgaaatggtgggggcctatggtgagcaattgctggagtggttgaataaacacaccttccctactgaacgtcgttatgaggatttagagtacgcccgcgaaatgtcggcgttcttcatcaagcagcttttacgtaacggaaccaccacggcgctggtgtttggcactgttcatccgcaatctgttgatgcgctgtttgaagccgccagtcatatcaatatgcgtatgattgccggtaaggtgatgatggaccgcaacgcaccggattatctgctcgacactgccgaaagcagctatcaccaaagcaaagaactgatcgaacgctggcacaaaaatggtcgtctgctatatgcgattacgccacgcttcgccccgacctcatctcctgaacagatggcgatggcgcaacgcctgaaagaagaatatccggatacgtgggtacatacccatctctgtgaaaacaaagatgaaattgcctgggtgaaatcgctttatcctgaccatgatggttatctggatgtttaccatcagtacggcctgaccggtaaaaactgtgtctttgctcactgcgtccatctcgaagaaaaagagtgggatcgtctcagcgaaaccaaatccagcattgctttctgtccgacctccaacctttacctcggcagcggcttattcaacttgaaaaaagcatggcagaagaaagttaaagtgggcatgggaacggatatcggtgccggaaccactttcaacatgctgcaaacgctgaacgaagcctacaaagtattgcaattacaaggctatcgcctctcggcatatgaagcgttttacctggccacgctcggcggagcgaaatctctgggccttgacgatttgattggcaactttttacctggcaaagaggctgatttcgtggtgatggaacccaccgccactccgctacagcagctgcgctatgacaactctgtttctttagtcgacaaattgttcgtgatgatgacgttgggcgatgaccgttcgatctaccgcacctacgttgatggtcgtctggtgtacgaacgcaactaa

SEQ ID NO: 108 - DNA, 570 bp, Escherichia coli
  CDS (1)...(570)
atgtctggagacatcctacaaacaccggacgcaccaaagccacagggcgcgctggataattattttaaaattaccgctcgtggcagtaccgttcgtcaggaagtactggctggcttaacgacctttctggccatggtttattccgttatcgtcgttccgggaatgctgggcaaagcaggttttcctcccgcagctgtgtttgttgccacctgtctggtcgcgggcttcggctcgttgctgatgggattatgggctaatttgccaatggcgattggttgcgcgatttccttgacggcgtttaccgcattcagtctggtactcgggcaacaaattagcgttcctgtcgcactgggcgcggtatttctgatgggcgtcatcttcaccgccatttccgtaaccggtgtgcgtacctggatcttacgtaatttgccgatgggtatcgctcacggtacaggtatcggtatcgggctgtttctgctgctgattgctgctaacggtgtgggtatggttatcaaaaacccgattgaaggcttgcagtggcgctcggtgcgtttacctccttcccggtga

SEQ ID NO: 109 - DNA, 831 bp, Escherichia coli
  CDS (1)...(831)
gtggcgctcggtgcgtttacctccttcccggtgatgatgagcttgctggggctggcggtcatcttcggcctggagaagtgtcgcgtacccggcgggatcttgttggtgattattgcaatttcgatcatcggcttaatctttgacccagcggtgaaataccacggtctggtggcgatgccaagcctgactggcgaagatggtaagtctctgattttcagcctcgatattatgggtgcactccagccaactgtacttccgagtgtactggcattggtgatgaccgcagtgttcgacgctactggcaccatccgtgccgtcgccggtcaggcgaatttgttggataaagacaaccagatcatcaacggcggcaaagccctgaccagtgactcagtaagttcaatattctccggcctggtgggcgcagcgcccgcagcggtttatatcgaatcagcggcaggaaccgccgccgggggtaaaacaggtttaaccgcaaccgtagtgggggcgttattcctgttaattctgtttttatcaccgctgtcatttttgatccctggttacgccactgcacccgctctgatgtacgtaggtttgctgatgttaagtaacgtctcgaagctggatttcaatgattttattgacgctatggctggcctggtgtgtgccgtgttcatcgttctgacttgtaatatcgttaccggtattatgctgggctttgtgacactggtcgtaggccgcgtctttgcacgcgaatggcaaaagctgaatattggtacggtgatcattactgccgcactggtcgcattttacgcgggtggttgggcaatctaa

SEQ ID NO: 110 - DNA, 1401 bp, Escherichia coli
  CDS (1)...(1401)
atgaatagcgaaggggggaaaccggggaatgtactgaccgttaacggcaactataccggaaacaatggcctgatgacgttcaacgcgacgctgggcggcgataattcgcccaccgataagatgaacgtgaaaggcgatacccaagggaacactcgcgttcgggttgataacattggcggcgtcggtgcacaaacggtcaacggtattgaactcattgaggttggcggtaattctgcaggtaacttcgcgctgaccaccggaactgtcgaagctggggcttacgtctacacgctggctaaagggaaggggaatgacgagaaaaactggtatctgaccagtaaatgggacggcgtaacgccagcggatacacccgatcccatcaataatccccctgttgtggatccggaaggcccatcagtttatcgcccggaggccggaagctatatcagcaacattgccgcagccaactcgctgtttagccatcgtttacacgaccgtctgggtgagccgcagtatacagattcactgcattctcaggggtcggcaagcagtatgtggatgcgtcatgtcggagggcacgaacgttcaagggccggtgacggtcagctaaatactcaggctaaccgctatgtattgcagctaggcggcgatttggcgcagtggagtagcaacgcgcaggatcgctggcatcttggcgtgatggcaggctacgccaatcagcacagtaatactcagagtaatcgtgtgggttataaatcggatgggcgcatcagcggttacagcgctgggctgtacgcgacctggtatcagaacgatgcgaataagaccggcgcttatgttgacagctgggcgctgtataactggtttgataacagcgtcagttccgataaccgttctgctgacgactatgattctcgcggtgtgacggcctctgttgagggtgggtatacctttgaagcgggaacatttagcggcagcgaagggacgctgaatacctggtacgtccagccacaggcgcaaatcacctggatgggtgtgaaagattccgaccatacccggaaagacggaacgcgcattgaaacggaaggcgacggaaatgtgcaaacgcgacttggggtgaaaacctacctgaacagccatcaccagcgtgacgatggtaaacagcgtgagttccagccttacattgaagcgaactggatcaacaatagcaaagtctacgccgtgaagatgaatggtcaaaccgtaggccgtgaaggtgcgcgtaatctcggtgaagtacgtaccggggttgaggcgaaagtaaataacaaccttagcctgtgggggaatgtcggtgtgcaactaggtgataaaggctatagcgatactcagggcatgctgggagtgaaatatagctggtaa

SEQ ID NO: 111 - DNA, 3978 bp, Escherichia coli
  CDS (1)...(3978)
atgaatagaatctatcgcgtgatatggaattgcactctacaggtatttcaggcctgctcggaattaactcgcagggcaggtaaaacatcgacggttaatttgcgtaaatcctctggactgacaacgaaattcagtagattgacgctgggtgttttgctggcactaagcggttcagcgtctggtgcaagtctggaagttgataatgatcagattaccaatattgatactgatgttgcttatgatgcctacctggttggctggtatggcactggagtgcttaatattttggctggcggtaatgcctccttaaccactattactaccagcgtcattggcgctaatgaggactcagagggcaccgttaatgttttgggtggcacctggcgattgtatgatagcggaaataatgcaaggcctttaaatgtgggtcaatccggaacggggacgctgaatattaaacagaagggtcacgtcgatggaggctatttaagattaggttcttcgacaggaggcgtcgggacggtcaatgttgagggagaggactctgttctgacgaccgaattattcgaaataggtagctatggcacaggttcattaaatattacggataagggttacgtcacgagttcaatcgtcgccattttaggctatcaggcgggcagtaatggccaggttgtcgttgaaaagggtggcgagtggctaataaaaaataatgattcctcaattgaatttcaaattggtaatcaaggaactggggaggcgactattcgcgagggggggttggttacggctgaaaatacgattatcggtggcaatgccaccggtatcggaaccctgaatgtgcaggatcaagactctgtcatcacggtacgcagactctataatggatatttcggtaatggcacagtcaatatttccaataatggactgattaataacaaagaatattcattggtgggcgttcaggacggttcccacggtgtcgtcaacgtgaccgataaagggcattggaatttcctcggaacgggcgaagctttccgctatatctatatcggtgatgctggcgacggtgaacttaatgtctcgagtgaaggcaaagtagattcgggaattatcactgcggggatgaaagaaacaggcacaggcaacattactgttaaggataagaactccgttatcactaatctcggaactaatcttggttatgacggccacggcgaaatgaatatcagtaatcaggggcttgttgtcagcaacggaggaagttcactcggttatggagaaaccggcgtcgggaatgtcagcatcaccacggggggaatgtgggaggtcaataagaatgtctataccaccattggtgttgcgggcgtcggaaacctcaatattagcgatggcggtaagttcgtatcgcaaaatattacttttttgggcgataaagcaagcggtatcggcacactgaacctgatggatgcgacatcatcgttcgatactgtgggtatcaatgtcggtaattttggtagcggtatcgtaaatgtcagtaatggtgccacccttaattcaacgggctatggatttatcggaggaaatgcctccggtaaggggatagttaatatttcaacggacagtctctggaatttaaagacatcatctactaacgcacaattgctacaggtcggtgtattaggcacgggtgaactgaatattaccaccggaggtatagttaaagcgcgtgatacacagatagctctcaatgacaaaagtaagggcgacgtgagggtggatgggcagaactctcttcttgaaacattcaatatgtacgtagggacatctggtacgggtacgttaaccctgacgaataacggtacgctgaatgtcgaaggtggagaagtttacttaggtgtttttgagcctgctgtaggaacgctaaacattggtgctgctcacggtgaggcggcggcagatgccggatttatcaccaatgcgacgaaagtggagtttggtcttggcgaaggcgtttttgtctttaatcataccaataacagtgatgccggctaccaggtcgatatgctgattacaggtgacgataaagacggaaaagtgatccatgatgcaggccatacggtgttcaatgcagggaatacttatagcggtaaaacgctggtcaatgacggcctcctgaccattgcgtctcatacggcagatggggtaacgggcatggggtcgagtgaagtaaccattgcaaaccccggtacgctcgacattctcgcatcaacgaacagtgcaggagattacacgctgaccaatgcgctcaaaggcgatggcttgatgcgagtgcagctgtcatcctccgacaagatgtttggctttacccatgcaacagggactgaattcgccggtgttgcccaactgaaagacagtaccttcactctggaacgcgacaacaccgctgcgcttactcacgcgatgttgcagtctgacagtgaaaataccacatcggtaaaagttggagagcaatccattggtggactggccatgaatggaggtaccatcattttcgatacggatattcctgctgcgacgctcgcggagggatatatcagcgtcgatacgctggttgtcggcgcgggtgactacacctggaaaggccgtaactatcaggtaaacgggacgggcgacgtgcttatcgacgtgcctaaaccgtggaatgatcccatggcgaataaccctctgacgacgctcaatttgctggaacacgacgatagccatgtcggcgttcaactggtgaaggcgcaaacggttattgggtcgggtggctcattaacgttacgtgatttacagggcgacgaggtggaagcggacaaaacgttacacattgcgcaaaacggaacggtggtcgccgagggtgattatggattccgcctcacgaccgcaccaggtaatggtttgtacgttaactatgggctgaaagcgctgaacatccatggtgggcaaaagctgacgttagccgaacatggcggagcctatggcgcaacggccgatatgtcggcaaaaatcggtggtgaaggggatctggcaatcaatacggtgcgacaggtttcgctttccaacggtcagaacgactatcagggggcaacctacgttcagatggggacattacgtaccgatgcggatggtgcacttggcaacacccgggaactgaacatcagcaacgcggccatcgtcgatcttaatggatcgacgcagacggtagagacattcaccgggcagatgggttcgactgttttgttcaaagagggggcgctgacggtaaataaaggtgggatcagtcagggtgaactgacaggtggcggaaacctgaatgttacagggggaacgctggctatcgaggggcttaatgcacgctacaatgcgttaaccagcattagcccaaatgcggaagtcagcctcgataatactcaggggttaggcagaggaaatattgccaatgacggtctgttaacgctaaaaaacgtgactggcgaactgcgtaatagcataagcgggaagggtatcgtgagcgcaaccgccaggacagatgtagagttggatggcgataatagccgctttgtggggcaattcaacattgatacaggcagcgcgctcagcgtcaacgagcagaaaaacctgggtgatgcttccgttatcaataatggcctgctcaccatctccactgagcgtagctgggcgatgacgcacagtatcagcggtagcggtgatgtgacaaaactgggtaccgggatcctgactcttaacaacgattccgcggcgtatcagggtacgacggatatcgtggggggggaaattgctttcggttccgactctgccattaatatggcaagtcaacacattaatatccataacagcggtgtgatgtcgggaaatgtcaccactgcaggtgatatgaacgttatgcctggggggggcactgcgtgtcgctaa

SEQ ID NO: 112 - DNA, 756 bp, Escherichia coli
  CDS (1)...(756)
atgactgaagcacaaagacatcaaatcctcctggaaatgctcgcacaattgggctttgtgaccgttgagaaagtcgttgagcgtctgggaatttcgcctgccactgcgcgacgcgatatcaataaacttgacgaaagcggcaaactgaaaaaagtgcgcaatggcgcagaagctattacccaacagcgcccgcgctggacgccgatgaatctgcatcaggcgcagaatcacgatgaaaaagtacgtatcgctaaagcggcctcgcagctggttaatccgggcgaaagcgtagtcatcaactgcggctccaccgcgtttctgcttgggcgggaaatgtgtggcaagccagtgcaaatcatcactaattatctaccgctggcaaattacctgatcgatcaagaacatgacagcgtgatcattatgggcggacagtacaacaaaagtcagtccatcactttaagcccgcagggcagcgaaaacagtctctatgccgggcactggatgtttaccagcggaaaagggctgaccgcagaagggttgtataaaaccgatatgctgacagcaatggcagagcagaagatgctgagcgtggtagggaaactggtggtactggttgatagcagtaagattggcgaacgcgcgggaatgctttttagccgtgccgatcaaatcgatatgcttatcaccggcaaaaatgctaacccggaaatcctgcaacaactggaagcgcaaggggtcagcattctgcgtgtttaa

SEQ ID NO: 113 - DNA, 825 bp, Escherichia coli
  CDS (1)...(825)
atgaccgaatttacaactcttcttcagcaaggaaacgcctggttcttcatccccagcgccatcttacttggtgcgcttcatggcctggaaccagggcactcaaaaacgatgatggcggcgtttatcatcgccatcaaaggcaccattaaacaagcggtgatgctcggactggcagcaactatttcgcataccgcagtggtctggttaattgcctttggcgggatggtgatcagcaagcgctttactgctcaatcagcagaaccgtggctccagctgatttccgcagtgatcattattagcaccgcgttctggatgttctggcgtacctggcgcggcgaacgcaactggctggagaatatgcacgggcatgattatgagcatcatcatcacgatcacgaacatcaccacgaccatggacatcatcaccatcacgaacatggcgagtatcaggatgcccatgcacgagcccatgccaatgacattaaacgacgctttgatggtagagaggtcaccaactggcaaattttgttatttggcttaaccggtggccttatcccctgcccggcagcaattaccgtgctgttgatatgcattcagttgaaagccctgacactgggcgcaacactggtcgtcagtttcagcattggcctggcgttaacgcttgtcaccgtaggcgttggcgcagcaatcagcgttcagcaggtcgcaaaacgctggagcggatttaacactctcgctaaacgcgccccctatttttccagtctgttgattggcttagtcggtgtgtatatgggcgtacatggcttcatgggcataatgcgataa

SEQ ID NO: 114 - DNA, 519 bp, Escherichia coli
  CDS (1)...(519)
atgattcttaaatcagctatttccgctgactctctgctcgctaaggatgcttttagggcatcctttcatttacactttttacgaaatcatgggatcactaacaaaatatcgcttgtcagttatattgtatggcaggaaagatatgcgactgatattacagatccccaaagtggagagtttatgaccattaaaaataagatgttgctgggtgcgcttttgctggttaccagtgccgcctgggccgcaccagccaccgcgggttcgaccaatacctcgggaatttctaagtatgagttaagtagtttcattgctgactttaagcatttcaaaccaggggacaccgtaccagaaatgtaccgtaccgatgagtacaacattaagcagtggcagttgcgtaacctgcccgcgcctgatgccgggacgcactggacctatatgggtggcgcgtacgtgttgatcagcgacaccgacggtaaaatcattaaagcctacgacggtgagattttttatcatcgctaa

SEQ ID NO: 115 - DNA, 1035 bp, Escherichia coli
  CDS (1)...(1035)
atggaaattcgcataatgctatttatattaatgatgatggttatgcctgtgagctatgcggcatgttatagtgagttatctgttcagcacaacttggttgttcagggggattttgcacttactcaaacacaaatggcgacatatgagcataattttaatgattcgtcatgcgtaagtacaaatactatcacccctatgagcccgtcggatattattgttggactttataacgataccataaaattaaatttacattttgaatggaccaataaaaacaacatcacgttgtcaaataatcagaccagtttcaccagtggttattcagttacggtgacacctgcggccagtaatgcaaaagtgaatgtttctgcggggggcggcggttcagtgatgattaatggtgttgcgacattatccagtgcttcatcatcgacacgcgggagtgccgcagtacaatttctactgtgtttattaggtggcaagtcatgggatgcatgtgtaaatagctacagaaatgcattggcacaaaatgcaggtgtctattcctttaatctgacattgtcatacaacccgataaccacaacctgcaaaccggacgatttattaattactttagacagtattcccgtttcacaattaccagccacaggtaacaaagcaacaataaatagtaaacaaggggatattattctgcgttgtaaaaatttattaggtcaacaaaatcaaacatcacggaaaatgcaggtgtatttatcaagttctgacttgttaaccaacagcaacacaatactgaaaggtgcggaagataatggcgtaggatttattcttgaaagtaatggttcgccagtcacacttttaaatatcactaacagcagtaaaggatatacaaatttaaaggaagttgcggcgaagtcaaaacttacagatacaacggtttcaattccgataacagccagttactacgtctacgatacaaacaaagttaaatctggcgcactggaggcaaccgcattaatcaacgtgaaatacgactaa

SEQ ID NO: 116 - DNA, 2481 bp, Escherichia coli
  CDS (1)...(2481)
atgttgagaatgaccccacttgcatcagcaatcgtagcgttattgctcggcattgaagcttatgcagctgaagaaacctttgatacccattttatgataggtggaatgaaagaccagcaggttgcaaatattcgtcttgatgataatcaacccttaccggggcagtatgacatcgatatttatgtcaataagcaatggcgcgggaaatatgagattattgttaaagacaacccgcaagaaacatgtttatcaagagaagttatcaagcggttaggcattaatagcgataacttcgccagcggtaagcaatgtttaacatttgagcaacttgttcagggtgggagctatacctgggatatcggggtttttcgtctcgatttcagtgtcccgcaggcctgggtggaagaactggaaagtggctatgttccaccggaaaactgggagcggggtattaatgcgttttatacctcttattatctgagtcagtattacagcgactataaagcgtcgggtaataacaagagtacatatgtacgttttaacagcgggttaaatttactggggtggcaactgcattctgatgccagtttcagtaaaacaaataacaatccaggggtgtggaaaagcaataccctgtatctggaacgtggatttgcccaacttctcggcacgcttcgcgtgggtgatatgtacacatcaagcgatatttttgattctgttcgcttcagaggtgtgcggttgtttcgtgatatgcagatgttgcctaactcgaaacaaaattttacgccacgggtgcaggggattgctcagagtaacgcgctggtaactattgaacagaatggttttgtggtttatcagaaagaggttcctcctggcccgttcgcgattacagatttgcagttggccggtggtggagcagatcttgatgtcagcgtgaaagaggcggacggctcggtaaccacctatctggtgccttatgcagcggtgccaaatatgctgcaacccggcgtgtcgaaatatgatttagcggcgggtcgtagccatattgaaggggcgagcaaacaaagtgattttgtccaggcgggttatcagtatggttttaataatttattgacgctgtatggtggctcgatggtcgcgaataattattacgcgtttactttgggggctggctggaatacacgcattggtgccatttccgtcgatgccactaagtcgcatagtaaacaagacaacggcgatgtgtttgacgggcaaagttatcaaattgcctacaacaaatttgtgagccaaacgtcgacgcgttttggtctggcggcctggcgttattcgtcgcgtgattaccggacatttaacgatcacgtttgggcaaacaataaagataattatcgccgtgatgaaaacgatgtctatgacattgccgattattaccagaacgattttggccgcaaaaatagcttttccgccaatatgagccagtcattgccagaaggttgggggtctgtgtcattaagtacgttatggcgagattactgggggcgtagcggcagtagtaaggattatcagttgagttattccaacaacctgcgacggataagctataccctcgcggcaagccaggcttatgacgagaatcatcatgaagagaaacgttttaatatttttatatcgattccctttgattggggtgatgacgtttcgacgcctcgtcggcaaatatatatgtctaactcaacgacgtttgatgatcaggggtttgcctcaaataatacgggattatcaggaacagtagggagtcgggatcagttcaattatggtgtcaacctgagtcatcaacatcagggaaatgaaacgacagctggggcgaatttgacctggaacgcgccggttgcgacagtgaatggcagttatagtcagtcgagtacttatcgacaggctggagccagtgtttcagggggcattgtcgcctggtcgggtggcgttaatctggcgaaccgtctttccgaaacgtttgctgtgatgaatgcgccaggaattaaagatgcttatgtcaatgggcaaaaatatcgcacaacaaaccgtaatggagtggtgatatacgacggaatgacaccttatcgggaaaatcacctgatgctggatgtgtcgcaaagcgatagcgaagcagaattacgtggcaaccggaaaattgccgccccttatcgcggcgcggttgtactggttaattttgataccgatcagcgcaagccatggtttataaaagcgttaagagcagatgggcaatcattaacgtttggttatgaagtcaatgatatccatggtcataatattggcgttgtcggccagggaagtcagttatttattcgcaccaatgaagtaccgccatcggttaatgtggcaattgataagcaacaaggactttcatgcacaatcaccttcggtaaagagattgatgaaagtagaaattatatttgccagtaa

SEQ ID NO: 117 - DNA, 720 bp, Escherichia coli
  CDS (1)...(720)
atggccgctatcccatggcggccttttaatttaagaggcattaaaatgaaaggattattatctttactcattttttctatggtccttcctgcacatgccggaattgttatctacgggacgcgcattatttacccggcagaaaataaagaagtgatggtgcagttgatgaaccagggaaaccgttcttcgctgctgcaggcgtggattgatgatggcgatacgtcattaccaccagaaaaaattcaggttcctttcatgttaacgccaccagtggcaaaaataggggcaaattccgggcagcaagtaaaaatcaaaattatgccgaataaactgcccactaataaagaaagcattttttatctgaatgttctggatattccaccaaatagtccagagcaagaaggtaagaatgcactgaagtttgcgatgcaaaacagaattaagttgttttaccggccagcgggtattgctccggtaaataaagcgacatttaaaaaattgctggtaaatcgcagtggcaatggtttggtgataaaaaatgactcagctaattgggtgacgatttcggatgtcaaagctaataatgtcaaagtcaattatgaaactattatgattgcccccttagaaagtcagagtgttaatgtcaaaagtaataatgcaaataactggcatctgaccattatcgatgaccatggcaactatattagtgacaaaatttaa

SEQ ID NO: 118 - DNA, 543 bp, Escherichia coli
  CDS (1)...(543)
atgaaacgttcaattattgctgccgctgtcttttcttctttttttatgagcgctggagtatttgctgcagacgttgataccggaacattaactattaaggggaatattgcagaatctccgtgtaaattcgaagcgggtggtgattcagtaagtattaatatgccgactgtaccaaccagtgtctttgaaggtaaagctaaatattctacctatgatgatgcagtcggtgtaaccagcagcatgttaaaaattagctgcccgaaagaagttgctggtgtaaaactctcgttgattaccaacgataaaataaccggtaacgataaggcgatagccagtagcaacgataccgtgggttactatctctatttaggtgataacagcgatgtcctggatgtttctgcaccttttaacattgagagttataaaacagcggaaggtcaatatgctattccgtttaaagcaaaatacctgaaactgacagataactcagtgcaatcaggtgatgtgttatcttctctggttatgcgtgtggcgcaggattaa

SEQ ID NO: 119 - DNA, 288 bp, Escherichia coli
  CDS (1)...(288)
atgctgcacacattacatcgctcaccctggctgacggattttgctgcgctgctgcgtctgctcagtgaaggagacgaactgctattattgcaagatggcgtaactgccgcagttgacggtaaccgctaccttgaaagtctgcgtaatgcccccattaaggtctatgccctgaacgaagaccttattgcccgcggtttgactggtcaaatttcgaacgacatcattctcattgactatactgatttcgtcagacttacggttaagcaccccagccagatggcctggtga

SEQ ID NO: 120 - DNA, 360 bp, Escherichia coli
  CDS (1)...(360)
atgaaacgaattgcgtttgttttttctactgcacctcatggtacagccgcaggccgggaaggtttagatgctttactggcaacttccgcattaactgacgatctggctgtcttctttatagctgatggcgtttttcagctgctgccaggacaaaagcccgatgcagtgctggcgcgtgattacattgccacttttaaattgttgggtctgtacgacattgaacagtgctgggtttgtgcggcttcactgcgcgaacgcgggttagatccgcagacaccctttgttgtcgaagccacgccgctcgaagcagatgccttacgccgcgaactcgccaactacgatgttattttgaggttttga

SEQ ID NO: 121 - DNA, 387 bp, Escherichia coli
  CDS (1)...(387)
atgcgttttgccatcgtggtgaccgggccagcatacggtacgcaacaggcgagtagtgcttttcagtttgcgcaggcgctgatagcagatggccatgagttaagcagcgtctttttctatcgggaaggggtctataacgctaaccaattgacctctccggcaagtgacgaatttgacctcgtacgggcctggcaacaactgaatgcgcaacatggtgtggcgctgaatatctgcgtagcggcagcattacgccgtggcgttgttgatgaaacggaggccggaagactggggctggcttcgtcaaaccttcagcagggatttaccttaagcggacttggggcgctggcggaagcctcgctgacctgtgacagggtggtacagttctga

SEQ ID NO: 122 - DNA, 735 bp, Escherichia coli
  CDS (1)...(735)
gtgttttttttcatgtccaggtcgcttttaaccaacgaaaccagtgagttggatttactggatcaacgtcctttcgaccagaccgattttgatattctgaaatcctacgaagcggtggtggacgggttagcgatgcttattggctcccactgtgaaatcgttttgcactctttgcaggatctaaaatgttcagccattcgcattgctaacggtgaacatacaggccggaagattggttcgccaattactgacctggcgctacgtatgctgcacgatatgacgggagcggatagcagcgtttctaaatgctactttactcgcgccaaaagcggcgtattaatgaagtccctgactatcgcgattcgtaaccgcgaacagcgtgtaattggtctgctgtgcatcaatatgaatcttgatgttcccttctcgcagattatgagcacctttgtgccgccagaaaccccggatgtcggttcaagcgtcaactttgcctcttctgttgaagatctggttacccaaacgctggagttcaccatcgaagaagtgaatgccgatcgcaatgtttctaataacgccaaaaatcgtcagatcgtgctgaatctctacgagaaagggatcttcgatattaaagatgcgatcaaccaggttgctgaccgcctgaacatctccaaacacactgtctatctctacatccgccagttcaagagcggtgatttccaggggcaagataagtaa

SEQ ID NO: 123 - DNA, 255 bp, Escherichia coli
  CDS (1)...(255)
atgaccgataaaatccgtactctgcaaggtcgcgttgttagcgacaaaatggagaaatccattgttgttgctatcgaacgttttgtgaaacacccgatctacggtaaattcatcaagcgtacgaccaaactgcacgtacatgacgagaacaacgaatgcggtatcggtgacgtggttgaaatccgcgaatgccgtccgctgtccaagactaaatcctggacgctggttcgcgttgtagagaaagcggttctgtaa

SEQ ID NO: 124 - DNA, 192 bp, Escherichia coli
  CDS (1)...(192)
atgaaagcaaaagagctgcgtgagaagagcgttgaagagctgaacaccgagctgctgaacctgctgcgtgagcagttcaacctgcgtatgcaggctgcaagtggccagctgcaacagtctcacctgttgaagcaagtgcgtcgcgatgtcgcacgcgttaagactttactgaacgagaaggcgggtgcgtaa

SEQ ID NO: 125 - DNA, 411 bp, Escherichia coli
  CDS (1)...(411)
atgttacaaccaaagcgtacaaaattccgtaaaatgcacaaaggccgtaaccgcggtctggcgcagggtacggatgttagcttcggcagcttcggtctgaaagctgttggccgtggtcgtctgactgcccgtcagatcgaagcagcacgtcgtgctatgacccgtgcagttaagcgtcaaggtaagatctggatccgtgtgttcccggacaaaccgatcactgaaaagccgctggcagtgcgtatgggtaaaggtaaaggtaacgtggagtattgggttgccttgattcagccgggtaaagtcctgtatgaaatggacggtgttccggaagagctggcccgtgaagcattcaagctggcagcagcgaaactgccgattaaaaccacctttgtaactaagacggtgatgtaa

SEQ ID NO: 126 - DNA, 702 bp, Escherichia coli
  CDS (1)...(702)
atgggtcagaaagtacatcctaatggtattcgcctgggtattgtaaaaccatggaactctacctggtttgcgaacaccaaagaattcgctgacaacctggacagcgattttaaagtacgtcagtacctgactaaggaactggctaaagcgtccgtatctcgtatcgttatcgagcgtccggctaagagcatccgtgtaaccattcacactgctcgcccgggtatcgttatcggtaaaaaaggtgaagacgtagaaaaactgcgtaaggtcgtagcggacatcgctggcgttcctgcacagatcaacatcgccgaagttcgtaagcctgaactggacgcaaaactggttgctgacagcatcacttctcagctggaacgtcgcgttatgttccgtcgtgctatgaagcgtgctgtacagaacgcaatgcgtctgggcgctaaaggtattaaagttgaagttagcggccgtctgggcggcgcggaaatcgcacgtaccgaatggtaccgcgaaggtcgcgtaccgctgcacactctgcgtgctgacatcgactacaacacctctgaagcgcacaccacttacggtgtaatcggcgttaaagtgtggatcttcaaaggcgagatcctgggtggtatggctgctgttgaacaaccggaaaaaccggctgctcagcctaaaaagcagcagcgtaaaggccgtaaataa

SEQ ID NO: 127 - DNA, 333 bp, Escherichia coli
  CDS (1)...(333)
atggaaactatcgctaaacatcgccatgctcgttcttctgctcagaaggttcgccttgttgctgacctgattcgcggtaagaaagtgtcgcaggctctggatattttgacctacaccaacaagaaagcggctgtactggtcaagaaagttctggaatctgccattgctaacgctgaacacaacgatggcgctgacattgacgatctgaaagttacgaaaattttcgtagacgaaggcccgagcatgaagcgcattatgccgcgtgcaaaaggtcgtgcagatcgcatcctgaagcgcaccagccacatcactgtggttgtgtccgatcgctga

SEQ ID NO: 128 - DNA, 279 bp, Escherichia coli
  CDS (1)...(279)
atgccacgttctctcaagaaaggtccttttattgacctgcacttgctgaagaaggtagagaaagcggtggaaagcggagacaagaagcccctgcgcacttggtcccgtcgttcaacgatctttcctaacatgatcggtttgaccatcgctgtccataatggtcgtcagcacgttccggtatttgtaaccgacgaaatggttggtcacaaactgggtgaattcgcaccgactcgtacttatcgcggccacgctgctgataaaaaagcgaagaagaaataa

SEQ ID NO: 129 - DNA, 822 bp, Escherichia coli
  CDS (1)...(822)
atggcagttgttaaatgtaaaccgacatctccgggtcgtcgccacgtagttaaagtggttaaccctgagctgcacaagggcaaaccttttgctccgttgctggaaaaaaacagcaaatccggtggtcgtaacaacaatggccgtatcaccactcgtcatatcggtggtggccacaagcaggcttaccgtattgttgacttcaaacgcaacaaagacggtatcccggcagttgttgaacgtcttgagtacgatccgaaccgttccgcgaacatcgcgctggttctgtacaaagacggtgaacgccgttacatcctggcccctaaaggcctgaaagctggcgaccagattcagtctggcgttgatgctgcaatcaaaccaggtaacaccctgccgatgcgcaacatcccggttggttctactgttcataacgtagaaatgaaaccaggtaaaggcggtcagctggcacgttccgctggtacttacgttcagatcgttgctcgtgatggtgcttatgtcaccctgcgtctgcgttctggtgaaatgcgtaaagtagaagcagactgccgtgcaactctgggcgaagttggcaatgctgagcatatgctgcgcgttctgggtaaagcaggtgctgcacgctggcgtggtgttcgtccgaccgttcgcggtaccgcgatgaacccggtagaccacccacatggtggtggtgaaggtcgtaactttggtaagcacccggtaactccgtggggcgttcagaccaaaggtaagaagacccgcagcaacaagcgtactgataaattcatcgtacgtcgccgtagcaaataa

SEQ ID NO: 130 - DNA, 303 bp, Escherichia coli
  CDS (1)...(303)
atgattcgtgaagaacgtctgctgaaggtgctgcgtgcaccgcacgtttctgaaaaagcgtctactgcgatggaaaaatccaacaccatcgtactcaaagttgctaaagacgcgaccaaagcagaaatcaaagctgctgtgcagaaactgtttgaagtcgaagtcgaagtcgttaacaccctggtagttaaagggaaagttaaacgtcacggacagcgtatcggtcgtcgtagcgactggaaaaaagcttacgtcaccctgaaagaaggccagaatctggacttcgttggcggcgctgagtaa

SEQ ID NO: 131 - DNA, 606 bp, Escherichia coli
  CDS (1)...(606)
atggaattagtattgaaagacgcgcagagcgcgctgactgtttccgaaactaccttcggtcgtgatttcaacgaagcgctggttcaccaggttgttgttgcttatgcagctggtgctcgtcagggtactcgtgctcagaagactcgtgctgaagtaactggttccggtaaaaaaccgtggcgccagaaaggcaccggccgtgcgcgttctggttctatcaagagcccgatctggcgttctggtggcgtgacctttgctgctcgtccgcaggaccacagtcaaaaagttaacaagaagatgtaccgcggcgcgctgaaaagcatcctgtccgaactggtacgtcaggatcgtctgatcgttgtcgagaagttctctgtagaagcgccgaaaactaagctgctggcacagaaactgaaagacatggctctggaagatgtgctgatcatcaccggtgagctggacgaaaacctgttcctggctgcgcgcaacctgcacaaggttgacgtacgcgatgcaactggtatcgacccggttagcctgatcgccttcgacaaagtcgtaatgactgctgatgctgttaagcaagttgaggagatgctggcatga

SEQ ID NO: 132 - DNA, 630 bp, Escherichia coli
  CDS (1)...(630)
atgattggtttagtcggtaaaaaagtgggtatgacccgtatcttcacagaagacggcgtttctatcccagtaaccgtaatcgaagttgaagcaaaccgcgttactcaggttaaagacctggctaacgatggctaccgtgctattcaggtgaccaccggtgctaaaaaagctaaccgtgtgaccaagcctgaagctggccacttcgctaaagctggcgtagaagctggccgtggtctgtgggaattccgcctggctgaaggcgaagagttcactgtaggtcagagcattagcgttgaactgtttgctgacgttaaaaaagttgacgtaactggcacctctaaaggtaaaggtttcgcaggtaccgttaagcgctggaacttccgtacccaggacgctactcacggtaactccttgtctcaccgcgttccgggttctatcggtcagaaccagactccgggcaaagtgttcaaaggcaagaaaatggcaggtcagatgggtaacgaacgtgtaaccgttcagagccttgacgtagtacgcgttgacgctgagcgcaacctgctgctggttaaaggtgctgtcccgggtgcaaccggtagcgacctgatcgttaaaccagctgtgaaggcgtaa

SEQ ID NO: 133 - DNA, 312 bp, Escherichia coli
  CDS (1)...(312)
atgcagaaccaaagaatccgtatccgcctgaaagcgtttgatcatcgtctgatcgatcaagcaaccgcggaaatcgtcgagactgccaagcgcactggtgcgcaggtccgtggtccgatcccgctgccgacacgcaaagagcgcttcactgttctgatctccccgcacgtcaacaaagacgcgcgcgatcagtacgaaatccgtactcacttgcgtctggttgacatcgttgagccaaccgagaaaaccgttgatgctctgatgcgtctggatctggctgccggtgtagacgtgcagatcagcctgggttaa

SEQ ID NO: 134 - DNA, 315 bp, Escherichia coli
  CDS (1)...(315)
atgatccgcaaagcctttgtcatgcaggtaaaccccgacgcccacgaagagtatcagcgtcggcataatcccatctggccagaactggaagcagtgctgaaatctcacggtgcgcataactacgccatctatctcgacaaagcgcgtaatctgctgtttgccatggtagagattgaatctgaagaacgctggaatgcggttgccagcactgatgtttgccaacgttggtggaaatatatgaccgatgttatgcccgctaacccggataacagcccggtgagtagcgagctgcaagaagtgttttacctgccgtaa

SEQ ID NO: 135 - DNA, 864 bp, Escherichia coli
  CDS (1)...(864)
atgatccgcagtatgaccgcctacgcccggcgtgaaatcaagggtgaatgggggagcgcaacctgggaaatgcgctcggtaaaccagcgttatctggaaacttactttcgtctgccggagcagttccgtagccttgaacctgtcgttcgcgagcgtattcgttctcgcctgacgcgcggtaaagtggaatgtaccctgcgctatgagccagatgttagcgcgcaaggtgagctgatcctcaacgaaaaactggctaaacagctggtaactgccgcgaactgggtaaaaatgcagagtgacgaaggggaaatcaacccggttgatattctacgctggccgggcgtgatggcagcccaggagcaggatcttgacgccattgccgctgaaattctcgcggcgctggatggtacgctggacgactttattgtcgcgcgcgaaaccgaaggtcaggcactgaaagcattgatcgagcagcgtctggaaggcgtcaccgccgaagtggtcaaagtccgctcccatatgccggaaatcctgcaatggcagcgtgagcgtctggtcgcgaagctggaagatgctcaggtgcaactggaaaacaaccgtctggagcaggaactggttctgctggcacaacgaattgacgttgccgaagaactggatcgcctcgaagcgcatgtcaaagagacctacaacattctgaagaaaaaagaagcggttggtcgtcgtctggattttatgatgcaggagttcaaccgcgagtcgaacactcttgcgtcgaagtctatcaatgccgaagtgacaaactccgccatcgagctgaaagtgttgattgagcagatgcgcgagcagattcagaacatcgaataa

SEQ ID NO: 136 - DNA, 492 bp, Escherichia coli
  CDS (1)...(492)
atgagcacagaaacaattgaaatattcaataatagtgatgaatgggcaaatcaactaaaacacgcattatcgaaaggagaaaatctggcattactacatggtttaactcctgatatccttgatagaatatatgcatatgcattcgactaccatgaaaagggtaatataacggacgcagaaatttattataaattcttgtgcatttatgcgttcgaaaatcatgagtatctaaaagattttgcatcagtatgtcagcccaaaaagaaatatcaacaagcatatgacctttacaaactaagttacaattacttcccgtatgatgactattcagttatttatcgtatgggtcaatgtcagattggggctaaaaatatcgataacgcaatgcaatgtttctatcacattattaacaattgtgaggatgatagtgttaagagtaaagcgcaggcatatattgaactcttaaacgataattcagaagataatggctaa

SEQ ID NO: 137 - DNA, 1947 bp, Escherichia coli
  CDS (1)...(1947)
atgaatattttaggttttttccagcgactcggtagggcgttacagctccctatcgcggtgctgccggtggcggcactgttgctgcgattcggtcagccagatttacttaacgttgcgtttattgcccaggcgggcggtgcgatttttgataacctcgcattaatcttcgccatcggtgtggcatccagctggtcgaaagacagcgctggtgcggcggcgctggcgggtgcggtaggttactttgtgttaaccaaagcgatggtgaccatcaacccagaaattaacatgggtgtactggcgggtatcattaccggtctggttggtggcgcagcctataaccgttggtccgatattaaactgccggacttcctgagcttcttcggcggcaaacgctttgtgccgattgccaccggattcttctgcctggtgctggcggccatttttggttacgtctggccgccggtacagcacgctatccatgcaggcggcgagtggatcgtttctgcgggcgcgctgggttccggtatctttggtttcatcaaccgtctgctgatcccaaccggtctgcatcaggtactgaacaccatcgcctggttccagattggtgaattcaccaacgcggcgggtacggttttccacggtgacattaaccgcttctatgccggtgacggcaccgcggggatgttcatgtccggcttcttcccgatcatgatgttcggtctgccgggtgcggcgctggcgatgtacttcgcagcaccgaaagagcgtcgtccgatggttggcggtatgctgctttctgttgctgttactgcgttcctgaccggtgtgactgagccgctggaattcctgttcatgttccttgctccgctgctgtacctcctgcacgcactgctgaccggtatcagcctgtttgtggcaacgctgctgggtatccacgcgggcttctctttctctgcgggggctatcgactacgcgttgatgtataacctgccggccgccagccagaacgtctggatgctgctggtgatgggcgttatcttcttcgctatctacttcgtggtgttcagtttggttatccgcatgttcaacctgaaaacgccgggtcgtgaagataaagaagacgagatcgttactgaagaagccaacagcaacactgaagaaggtctgactcaactggcaaccaactatattgctgcggttggcggcactgacaacctgaaagcgattgacgcctgtatcacccgtctgcgccttacagtggctgactctgcccgcgttaacgatacgatgtgtaaacgtctgggtgcttctggggtagtgaaactgaacaaacagactattcaggtgattgttggcgcgaaagcagaatccatcggcgatgcgatgaagaaagtcgttgcccgtggtccggtagccgctgcgtcagctgaagcaactccggcaactgccgcgcctgtagcaaaaccgcaggctgtaccaaacgcggtatctatcgcggagctggtatcgccgattaccggtgatgtcgtggcactggatcaggttcctgacgaagcattcgccagcaaagcggtgggtgacggtgtggcggtgaaaccgacagataaaatcgtcgtatcaccagccgcagggacaatcgtgaaaatcttcaacaccaaccacgcgttctgcctggaaaccgaaaaaggcgcggagatcgtcgtccatatgggtatcgacaccgtagcgctggaaggtaaaggctttaaacgtctggtggaagagggtgcgcaggtaagcgcagggcaaccgattctggaaatggatctggattacctgaacgctaacgcccgctcgatgattagcccggtggtttgcagcaatatcgacgatttcagtggcttgatcattaaagctcagggccatattgtggcgggtcaaacaccgctgtatgaaatcaaaaagtaa

SEQ ID NO: 138 - DNA, 1239 bp, Escherichia coli
  CDS (1)...(1239)
atgaagactatcttcaggtacattctttttttagcactgtattcttgttgtaatacagtcagtgcatatacaagttttattgtgggaaataatgcaggagttgataactatcgaggcccctccactgccgcacagatgacctttaattacacatcaacagcaagcaacttggttttttataaacccacgcagctcggcccgactggggtaaaaatgtactggtcatacctggatacaggtaccggtggtggtattctttactgcaatacatctggcagagcgaatcctggtccaataactattgaaaatgccatggtctattcaggtaaagattatggcggacataaactatttaatacatctgttcctggtctgtattacaccatgttaatatcaagggtctggtctgcatacgatacaataactgacattcaatcgccaggaatctatatcggagatccttccaaccaagaatttttcttttccgtcacagacagcgatctacaaactaagggttgcaacaaagcagacgactacgataagttttgggctattggtggtatagtacacaacataactgttgaattttatacagatactaatttcgatcctacacttaatcagcaagtccagttatccagttcatcaaattacctttattcgtttaaggcctacagtcctggtacaaaagttgtagatcacagcaaccacatttatgtcaatttcacactgaataatgtcaaattaaccttaccaacatgttttacctccatacttaccgggccatcagtcaatggttcaacggttagaatgggagaatatagctctgggacaattaaaaatggcgcttcacctgttccctttgatatctcgcttcagaattgtattcgtgtgcgtaatattgaaacaaaactcgtcactggaaaagtaggtactcaaaacacacaactgcttggtaatacgcttactggaagcactgccgccaaaggcgttggcgtactcattgaaggtttagcaaccagtaaaaatccgctaatgacattaaaacctaatgatacgaattctgtttatatagattatgaaaccgaagatgacacctccgatggggtttaccctaatcaaggtaacggcacatcacagcctcttcatttccaggcaacattaaagcaagacgggaatattgctatcgaacccggcgaatttaaagccaccagtactttccaggtaacctatccctga

SEQ ID NO: 139 - DNA, 597 bp, Escherichia coli
  CDS (1)...(597)
atgcatcccactcaacgtaagctgatgaagagaataattctgtttctgtcattactgttttgcatcgcctgtccagccattgctggacaggatattgaccttgttgccaatgtaaaaaacagcacctgcaaaagcggaatcagtaaccagggtaatattgatcttggcgtcgttggggtgggatatttttcaggtaatgttactcctgaaagttatcaaccaggtggaaaagagttcactatcactgtatccgactgtgcattacagggaactggcgatgtgctaaatcagttacatattgattttagagcccttagcggtgtcatggctgctggctctaggcaaatatttgctaatgaaatttcgtcaggagcaagtaatgtaggagtagttatattttctactcaggattcggcgaatacattcaatgttcttaatgcttcaggcggatctcgttccgtttatccagtaatgtcggatgacatgaatggttcatcctggaaatttagcacccgaatgcaaaaaatcgatcctgcattgagtgttacatctggtcaacttatgagccatgtgttagtggatatttactacgaataa

SEQ ID NO: 140 - DNA, 606 bp, Escherichia coli
  CDS (1)...(606)
atgatgacatttaaaaatttacgttatggattatccagcagtgtcgttttggctgcctcattgttcagcgtactctcttatgcggcaacagacagtattggactgaccgttattactactgtagaaatgggtacttgtaccgctacattagtaaatgactctgatcaggacatttctgttgttgattttggtgatgtatatatttctgaaatcaatgccaagaccaaagtaaaaacattcaaactcaaattcaaagactgtgcgggtatccccaataaaaaagcgcaaataaaattaaccaagcgagccacatgcgagggaactgctaatgacggtgcggggtttgcaaatggttccacagccgcagataaagcaagtgctgtcgccgttgaagtctggagcactgtaactccggcaacagggagtgcaacacaatttagctgtgtaacaccagcatcacaagaggtaacaatctccactgcagccaatgcggtcgtttattatccgatgagtgcacgcctggtcgtggaaaaaaataaaaccgtaaacaatgtcactgcgggtaagttttctgcaccagccacatttacagtaacctataactaa

SEQ ID NO: 141 - DNA, 612 bp, Escherichia coli
  CDS (1)...(612)
atggaattcggtgtcagattcagtaactacaagggacgtcaaatgataaaaacaacgccacataaaatagtgatactgatgggaatattattatcaccctcagtatttgcaacggatattaatgtagagtttacagccactgtcaaagcgacaacctgtaacatcacacttactggtaataacgtcacgaatgatggcaataataactacacattgagaatccctaagatgggtctggataagatcgcgaataaaacgacagaatctcaggctgattttaaactggttgccagtgggtgcagcagtggcatcagttggattgataccactctgaccggaaatgcatcatcaagctcacctaagcttattataccgcagtctggtgattcatcttcgacgacaagtaatatcggtatgggtttcaaaaaacggactactgatgatgccactttccttaaacctaacagtgcggaaaagatacgctggagcacagacgagatgcagcccgataagggtcttgaaatgaccgttgcgctacgtgaaacagatgcagggcaaggcgtaccggggaattttcgtgcactggcgacgtttaatttcatctatcaataa

SEQ ID NO: 142 - DNA, 420 bp, Escherichia coli
  CDS (1)...(420)
atggcaatgacttaccacctggacgtcgtcagcgcagagcaacaaatgttctctggtctggtcgagaaaatccaggtaacgggtagcgaaggtgaactggggatctaccctggccacgcaccgctgctcaccgccattaagcctggtatgattcgcatcgtgaaacagcacggtcacgaagagtttatctatctgtctggcggcattcttgaagtgcagcctggcaacgtgaccgttctggccgacaccgcaattcgcggccaggatctcgacgaagcgcgagccatggaagcgaaacgtaaggctgaagagcacattagcagctctcacggcgacgtagattacgctcaggcgtctgcggaactggccaaagcgatcgcgcagctgcgcgttatcgagttgaccaaaaaagcgatgtaa

SEQ ID NO: 143 - DNA, 1383 bp, Escherichia coli
  CDS (1)...(1383)
atggctactggaaagattgtccaggtaatcggcgccgtagttgacgtcgaattccctcaggatgccgtaccgcgcgtgtacgatgctcttgaggtgcaaaatggtaatgagcgtctggtgctggaagttcagcagcagctcggcggcggtatcgtacgtaccatcgcaatgggttcctccgacggtctgcgtcgcggtctggatgtaaaagacctcgaacacccgattgaagtcccggtaggtaaagcgactctgggccgtatcatgaacgtactgggtgaaccggtcgacatgaaaggcgagatcggtgaagaagagcgttgggcgattcaccgcgcagcaccttcctacgaagagctgtcaaactctcaggaactgctggaaaccggtatcaaagttatcgacctgatgtgtccgttcgctaagggcggtaaagttggtctgttcggtggtgcgggtgtaggtaaaaccgtaaacatgatggagctcattcgtaacatcgcgatcgagcactccggttactctgtgtttgcgggcgtaggtgaacgtactcgtgagggtaacgacttctaccacgaaatgaccgactccaacgttatcgacaaagtatccctggtgtatggccagatgaacgagccgccgggaaaccgtctgcgcgttgctctgaccggtctgaccatggctgagaaattccgtgacgaaggtcgtgacgttctgctgttcgttgacaacatctatcgttacaccctggccggtacggaagtatccgcactgctgggccgtatgccttcagcggtaggttatcagccgaccctggcggaagagatgggcgttctgcaggaacgtatcacctccaccaaaactggttctatcacctccgtacaggcagtatacgtacctgcggatgacttgactgacccgtctccggcaaccacctttgcgcaccttgacgcaaccgtggtactgagccgtcagatcgcgtctctgggtatctacccggccgttgacccgctggactccaccagccgtcagctggacccgctggtggttggtcaggaacactacgacaccgcgcgtggcgttcagtccatcctgcaacgttatcaggaactgaaagacatcatcgccatcctgggtatggatgaactgtctgaagaagacaaactggtggtagcgcgtgctcgtaagatccagcgcttcctgtcccagccgttcttcgtggcagaagtattcaccggttctccgggtaaatacgtctccctgaaagacaccatccgtggctttaaaggcatcatggaaggcgaatacgatcacctgccggagcaggcgttctacatggtcggttccatcgaagaagctgtggaaaaagccaaaaaactttaa

SEQ ID NO: 144 - DNA, 864 bp, Escherichia coli
  CDS (1)...(864)
atggccggcgcaaaagagatacgtagtaagatcgcaagcgtccagaacacgcaaaagatcactaaagcgatggagatggtcgccgcttccaaaatgcgtaaatcgcaggatcgcatggcggccagccgtccttatgcagaaaccatgcgcaaagtgattggtcaccttgcacacggtaatctggaatataagcacccttacctggaagaccgcgacgttaaacgcgtgggctacctggtggtgtcgaccgaccgtggtttgtgcggtggtttgaacattaacctgttcaaaaaactgctggcggaaatgaagacctggaccgacaaaggcgttcaatgcgacctcgcaatgatcggctcgaaaggcgtgtcgttcttcaactccgtgggcggcaatgttgttgcccaggtcaccggcatgggggataacccttccctgtccgaactgatcggtccggtaaaagtgatgttgcaggcctacgacgaaggccgtctggacaagctttacattgtcagcaacaaatttattaacaccatgtctcaggttccgaccatcagccagctgctgccgttaccggcatcagatgatgatgatctgaaacataaatcctgggattacctgtacgaacccgatccgaaggcgttgctggataccctgctgcgtcgttatgtcgaatctcaggtttatcagggcgtggttgaaaacctggccagcgagcaggccgcccgtatggtggcgatgaaagccgcgaccgacaatggcggcagcctgattaaagagctgcagttggtatacaacaaagctcgtcaggccagcattactcaggaactcaccgagatcgtctcgggggccgccgcggtttaa

SEQ ID NO: 145 - DNA, 1542 bp, Escherichia coli
  CDS (1)...(1542)
atgcaactgaattccaccgaaatcagcgaactgatcaagcagcgcattgctcagttcaatgttgtgagtgaagctcacaacgaaggtactattgtttctgtaagtgacggtgttatccgcattcacggcctggccgattgtatgcagggtgaaatgatctccctgccgggtaaccgttacgctatcgcactgaacctcgagcgcgactctgtaggtgcggttgttatgggtccgtacgctgaccttgccgaaggcatgaaagttaagtgtactggccgtatcctggaagttccggttggccgtggcctgctgggccgtgtggttaacactctgggtgcaccaatcgacggtaaaggtccgctggatcacgacggcttctctgctgtagaagcaatcgctccgggcgttatcgaacgtcagtccgtagatcagccggtacagaccggttataaagccgttgactccatgatcccaatcggtcgtggtcagcgtgaattgatcatcggtgaccgtcagacaggtaaaaccgcactggctatcgatgccatcatcaaccagcgcgattccggtatcaaatgtatctatgtcgctatcggccagaaagcgtccaccatttctaacgtggtacgtaaactggaagagcacggcgcactggctaacaccatcgttgtggtagcaaccgcgtctgaatccgctgcactgcaatacctggcaccgtatgccggttgcgcaatgggcgaatacttccgtgaccgcggtgaagatgcgctgatcatttacgatgacctgtctaaacaggctgttgcttaccgtcagatctccctgctgctccgtcgtccgccaggacgtgaagcattcccgggcgacgttttctacctccactctcgtctgctggagcgtgctgcacgtgttaacgccgaatacgttgaagccttcaccaaaggtgaagtgaaagggaaaaccggttctctgaccgcactgccgattatcgaaactcaggcgggtgacgtttctgcgttcgttccgaccaacgtaatctccattaccgatggtcagatcttcctggaaaccaacctgttcaacgccggtattcgtcctgcggttaacccgggtatttccgtatcccgtgttggtggtgcagcacagaccaagatcatgaaaaaactgtccggtggtatccgtaccgctctggcacagtatcgtgaactggcagcgttctctcagtttgcatccgaccttgacgatgcaacacgtaagcagcttgaccacggtcagaaagtgaccgaactgctgaaacagaaacagtatgcgccgatgtccgttgcgcagcagtctctggttctgttcgcagcagaacgtggttacctggcggatgttgaactgtcgaaaattggcagcttcgaagccgctctgctggcttacgtcgaccgtgatcacgctccgttgatgcaagagatcaaccagaccggtggctacaacgacgaaatcgaaggcaagctgaaaggcatcctcgattccttcaaagcaacccaatcctggtaa

SEQ ID NO: 146 - DNA, 534 bp, Escherichia coli
  CDS (1)...(534)
atgtctgaatttattacggtagctcgcccctacgccaaagcagcttttgactttgccgtcgaacaccaaagtgtagaacgctggcaggacatgctggcgtttgccgccgaggtaaccaaaaacgaacaaatggcagagcttctctctggcgcgcttgcgccagaaacgctcgccgagtcgtttatcgcagtttgtggtgagcaactggacgaaaacggtcagaacctgattcgggttatggctgaaaatggtcgtcttaacgcgctcccggatgttctggagcagtttattcacctgcgtgccgtgagtgaggctaccgctgaggtagacgtcatttccgctgccgcactgagtgaacaacagctcgcgaaaatttctgctgcgatggaaaaacgtctgtcacgcaaagttaagctgaattgcaaaatcgataagtctgtaatggcaggcgttatcatccgagcgggtgatatggtcattgatggcagcgtacgcggtcgtcttgagcgccttgcagacgtcttgcagtcttaa

SEQ ID NO: 147 - DNA, 471 bp, Escherichia coli
  CDS (1)...(471)
gtgaatcttaacgcaacaatcctcggccaggccatcgcgtttgtcctgttcgttctgttctgcatgaagtacgtatggccgccattaatggcagccatcgaaaaacgtcaaaaagaaattgctgacggccttgcttccgcagaacgagcacataaggaccttgaccttgcaaaggccagcgcgaccgaccagctgaaaaaagcgaaagcggaagcccaggtaatcatcgagcaggcgaacaaacgccgctcgcagattctggacgaagcgaaagctgaggcagaacaggaacgtactaaaatcgtggcccaggcgcaggcggaaattgaagccgagcgtaaacgtgcccgtgaagagctgcgtaagcaagttgctatcctggctgttgctggcgccgagaagatcatcgaacgttccgtggatgaagctgctaacagcgacatcgtggataaacttgtcgctgaactgtaa

SEQ ID NO: 148 - DNA, 240 bp, Escherichia coli
  CDS (1)...(240)
atggaaaacctgaatatggatctgctgtacatggctgccgctgtgatgatgggtctggcggcaatcggtgctgcgatcggtatcggcatcctcgggggtaaattcctggaaggcgcagcgcgtcaacctgatctgattcctctgctgcgtactcagttctttatcgttatgggtctggtggatgctatcccgatgatcgctgtaggtctgggtctgtacgtgatgttcgctgtcgcgtag

SEQ ID NO: 149 - DNA, 816 bp, Escherichia coli
  CDS (1)...(816)
atggcttcagaaaatatgacgccgcaggattacataggacaccacctgaataaccttcagctggacctgcgtacattctcgctggtggatccacaaaaccccccagccaccttctggacaatcaatattgactccatgttcttctcggtggtgctgggtctgttgttcctggttttattccgtagcgtagccaaaaaggcgaccagcggtgtgccaggtaagtttcagaccgcgattgagctggtgatcggctttgttaatggtagcgtgaaagacatgtaccatggcaaaagcaagctgattgctccgctggccctgacgatcttcgtctgggtattcctgatgaacctgatggatttactgcctatcgacctgctgccgtacattgctgaacatgtactgggtctgcctgcactgcgtgtggttccgtctgcggacgtgaacgtaacgctgtctatggcactgggcgtatttatcctgattctgttctacagcatcaaaatgaaaggcatcggcggcttcacgaaagagttgacgctgcagccgttcaatcactgggcgttcattcctgtcaacttaatccttgaaggggtaagcctgctgtccaaaccagtttcactcggtttgcgactgttcggtaacatgtatgccggtgagctgattttcattctgattgctggtctgttgccgtggtggtcacagtggatcctgaatgtgccgtgggccattttccacatcctgatcattacgctgcaagccttcatcttcatggttctgacgatcgtctatctgtcgatggcgtctgaagaacattaa

SEQ ID NO: 150 - DNA, 393 bp, Escherichia coli
  CDS (1)...(393)
gtgaaaaacgtgatgtctgtgtcgctcgtgagtcgaaacgttgctcggaagcttctgctcgttcagttactggtggtgatagcaagtggattgctgttcagcctcaaagaccccttctggggcgtctctgcaataagcgggggcctggcagtctttctgcctaacgttttgtttatgatatttgcctggcgtcaccaggcgcatacaccagcgaaaggccgggtggcctggacattcgcatttggcgaagctttcaaagttctggcgatgttggtgttactggtggtggcgttggcggttttaaaggcggtattcttgccgctgatcgttacgtgggttttggtgctggtggttcagatactggcaccggctgtaattaacaacaaagggtaa

SEQ ID NO: 151 - DNA, 1242 bp, Escherichia coli
  CDS (1)...(1242)
atgcaaaaacacggcgaccgctatgtgtggatcaacccgcctgctattccgctttctaccgaagagatggacagcgtttttgcgctgccatacaagcgcgtgccacatccggcctatggcaatgcccgtattccggcttacgaaatgatccgtttttcggtcaacattatgcgtggctgctttggcggctgctctttctgttctatcaccgagcacgaagggcgcattattcagagccgttccgaagattcgatcattaatgagatcgaagcgatccgcgacaccgttccaggttttacgggcgtgatttccgatcttggtgggccaactgccaacatgtatatgttgcgctgcaaatcgccacgcgctgaacaaacttgtcgccgtttgtcgtgcgtttatccggatatttgtccgcacatggacacgaaccacgaaccaacgatcaacctctatcgccgtgcgcgtgatctgaaaggcattaaaaagatcctgattgcctctggtgtgcgttatgacatagccgtagaagatccgcgctatatcaaagaactggcgacccatcacgtcggcggttatctgaagattgccccggaacataccgaagaagggccgttatcgaagatgatgaagccgggcatgggcagctatgaccgctttaaagagctgttcgatacttactcaaaacaggcaggtaaagagcagtatctgatcccctatttcatctccgcgcaccccggtacgcgtgatgaagatatggtgaatctggcgctgtggctgaaaaagcaccgcttccgcctcgaccaggtgcagaacttctatccgtcgccgctggcgaactcaaccaccatgtattacaccgggaaaaacccgctggcgaagattggttataagagcgaagacgtcttcgtaccgaagggcgacaaacagcgtcgtttgcataaagcgttgttgcgttaccacgatccggcaaactggccgttaatccgccaggcgctggaagcgatgggcaaaaagcatctgattggcagccgtcgcgattgcttagtgcctgcgccaaccattgaagagatgcgtgaagctcgtcgccagaaccgcaatacccgtccggcgttgacgaaacatacgccgatggcgacccagcgtcagacgcctgctacggcaaaaaaagcgtcgtctacgcaatctcgtccggtgaatgctggtgcgaagaaacggcctaaagcggcggttggacgttaa

SEQ ID NO: 152 - DNA, 978 bp, Escherichia coli
  CDS (1)...(978)
atgagctctatctccctgatccaaccggatcgcgacctgttctcctggccgcagtactgggccgcctgttttggaccggcaccgtttttgccgatgtctcgtgaagagatggatcaacttggctgggatagctgcgacatcattttggttactggcgacgcgtatgtcgatcacccaagcttcgggatggcgatttgcggtcgtatgctggaagcgcagggctttcgcgtcgggatcatcgcccagccggactggagcagcaaagacgactttatgcgtctgggtaaaccgaatctgtttttcggtgttactgctggcaacatggattcgatgatcaaccgttataccgccgatcgccgtttacgtcatgacgatgcctacacgccggataacgtcgcgggtaagcgcccggatcgcgccacactggtttatacccagcgttgtaaagaggcgtggaaagatgtaccggtgatcctcggcggtattgaggctagtctgcgccgtaccgcgcattatgattactggtccgataccgtgcgccgttccgtgctggtggattcgaaagccgacatgctgatgtttggtaacggtgagcgtccgctggtggaagtggcgcatcgtctggcgatgggcgagccaattagtgaaatccgcgatgtgcgtaataccgcgattatcgtgaaagaggcgctgcctggctggagcggcgtggattccacccgtcttgatacccctggaaaaatcgacccaatcccgcatccgtatggtgaagatttgccgtgcgcggataacaaaccggtggcaccgaaaaagcaggaagccaaagccgtaaccgtgcagccaccgcgcccgaaaccgtgggaaaaaacctacgtgttgctgccttctttcgagaaagtgaagggcgataaagtgctgtacgcccatgcttcgcgtattctgcaccacgaaaccaacccagctgtgcccgcgcattga

SEQ ID NO: 153 - DNA, 681 bp, Escherichia coli
  CDS (1)...(681)
atgattcagtatctgaacgtctttttttacgatatctacccgtacatttgtgcgacggtgtttttcctcggcagctggctgcgctacgactacgggcagtacacctggcgcgcctcctcaagtcaaatgctcgataaacgcgggatggtgatatggtcgaatctgttccatatcggcattttggggattttcttcgggcacttgttcggcatgttaacgccgcactggatgtacgcgtggtttttgccagtggcagcgaaacaactcatggcgatggtgctcggcggtatttgcggtgtgttgacgttgattggcggcgcaggactgctgtggcgcaggctgacaaatcagcgcgtgcgtgccacttccactacgccggatatcatcatcatgagcattttgctgatccagtgtctgttggggctaagtaccataccgttttcagcacagtatcctgatggtagcgaaatgatgaagctggtgggttgggcgcaaagcattgtcactttccgtggtggatcgtcagagatgctcaacggcgtagcgttcgtcttccgcctgcatctggtgttgggaatgaccatcttcctgctcttcccgttcacccgactggtgcatgtgtggagcgcgccgtttgagtactttactcgtcgatatcaaattgtgcgttcgcggcgataa

SEQ ID NO: 154 - DNA, 696 bp, Escherichia coli
  CDS (1)...(696)
atgcagatcctcaaagtgatcggcctgttgatggagtatccggacgagctgttgtgggaatgcaaggaggacgcgctggcgttgatccgccgcgacgcgccgatgcttacggatttcacccacaacctgcttaacgcgccgctgctggataaacaggccgaatggtgcgaagtgtttgaccgcgggcgcaccacgtcgctgctgctgttcgaacatgttcatgccgagtcccgcgatcgcggccaggcaatggtggacctgctggcggagtatgaaaaggtcggcctgcagctggattgtcgggaactgcccgattatctaccgctgtatctggagtatttaagcgtactgcctgacgatcaggcgaaagaaggattgctcaatgttgcgccgatcctcgccctgcttggcggtcgcttaaaacaacgcgaggcaccgtggtacgcgttgtttgatgctctgctgcaactggcgggaagctccctttcaagtgacagtgtcacaaaacaagtaaacagcgaagagcgcgatgacacccgccaggcgcttgatgcagtgtgggaagaggaacaggtgaagtttattgaagataacgccacggcgtgtgacagctcgccgcttaatcaatatcagcgacgctttagccaggatgtcgcgccgcaatatgtcgacatcagtgcgggaggtgggaaatga

SEQ ID NO: 155 - DNA, 1545 bp, Escherichia coli
  CDS (1)...(1545)
atgaaaatccgttcacaagtcggcatggtgcttaacctcgacaaatgtatcggctgccatacctgttcggtgacctgtaaaaacgtctggaccgggcgcgaaggcatggagtacgcatggtttaacaacgtcgaaaccaaaccgggcattggttatccgaaaaactgggaagatcaggaagagtggcaaggcggctgggtgcgtgatgtgaatggcaagatacgcccgcgtctgggcaacaagatgggcgtaataaccaaaatcttcgccaacccggtggtgccgcagattgatgattactacgaacctttcaccttcgactacgaacatttgcatagcgcaccggaaggcaaacatattcctactgctcgcccgcgttcactgattgacggcaaacggatggacaaagtgatctgggggccaaactgggaagaactgctgggcggtgagttcgaaaaacgtgcccgcgaccgcaacttcgaggccatgcaaaaggagatgtacgggcagtttgaaaacaccttcatgatgtacctgccgcgcctgtgcgaacactgcctcaatcccagctgcgtggcgacctgcccaagcggcgctatctacaaacgcgaagaagacggcattgtgctgattgatcaggataaatgccgtggctggcgtttgtgcataagcggttgtccgtacaaaaaaatctacttcaactggaaaagcggcaagtcagaaaaatgcatcttctgttacccacgaattgagtccggtcaaccgaccgtgtgctcagaaacctgcgtgggtcgcatccggtatctgggcgtgctgctttacgacgccgaccgcatcgaggaagcggcgagcaccgagcgcgaagttgacctctatgaacgccagtgcgaagtgttcctcgatccacacgatccctcagtgatcgaggaagccctgaaacaaggtattccacaaaatgtgattgacgctgcccagcgttcgccagtctacaaaatggcgatggactggaaactggcactaccgttgcaccctgaataccgcaccctgccgatggtctggtacgttcctccgctgtcaccgattcagtcctacgcagatgcgggcggtttgccgaaaagcgaaggcgtgctgcccgccatcgaaagcctgcgtattccggtgcaatatctcgccaatatgttgagtgccggcgataccggtccggtactgcgggcgctgaaacggatgatggcgatgcgccactatatgcgttcacaaaccgtggaaggcgttactgatactcgtgccatcgacgaagtaggcctgagcgtcgcccaggtcgaagagatgtatcgctatctcgccattgccaactatgaagatcgttttgttatcccgaccagccatcgggaaatggcgggcgatgccttcgcagaacgcaacggctgcggttttacctttggcgacggttgccacggttcggacagtaaattcaacctgttcaacagtagccgtatcgatgccatcaacatcaccgaagtgcgcgacaaagcggagggcgaataa

SEQ ID NO: 156 - DNA, 3741 bp, Escherichia coli
  CDS (1)...(3741)
atgagtaaacttttggatcgctttcgctacttcaaacaaaagggcgaaacctttgccgatggtcacggacaggtgatgcatagcaaccgcgactgggaggacagctatcgccagcgttggcagttcgacaaaatcgtgcgttccacccacggtgttaactgtacaggctcctgtagctggaaaatctacgttaaaaatggtctggtgacctgggaaatccaacagaccgactacccgcgcactcgccctgacctgcccaatcatgaacctcgcggctgcccgcgtggcgcaagttactcctggtatctttacagcgctaaccgcctgaaatacccgctcattcgtaaacgactgattgaactgtggcgcgaagccctcaagcaacacagcgatccggtactggcgtgggcatcgattatgaacgatccgcaaaagtgcctgagctacaaacaagtgcgtgggcgcggcgggtttatccgctccaactggcaggaactaaaccagctgattgccgccgctaacgtctggaccatcaaaacctacggcccggatcgcgttgccggtttctcgccgatcccggcgatgtcgatggtttcttacgccgccggaacgcgttatctgtcgctgcttggcggcacctgtttaagtttctacgactggtattgcgacctgccgcccgcctcgccgatgacctggggcgagcaaaccgacgtaccggaatctgccgactggtataactccagctacatcatcgcctgggggtctaacgtaccgcagacacgtacgccggacgcccacttctttaccgaagtacgctacaaaggcactaaaaccatcgccattacccctgactactctgaagtggccaaattgtgcgaccagtggctggcaccgaaacaaggcactgatagcgccctggcgatggcaatgggccatgtgattttaaaagagtttcatctcgataatcccagcgactactttatcaactactgccgccgctacagcgacatgccgatgctggtaatgctggagcctcgcgacgatggtagctacgttcccgggcgcatgatccgcgcatctgacctggtggatggactgggcgaaagcaacaatccgcagtggaaaaccgtagcagttaataccgcaggtgaattggtagtgccgaacggttcgattggtttccgctggggagaaaaaggcaaatggaatctggaatccattgccgccggtacggaaaccgaattgtcgttaaccctgctcggtcaacatgacgctgttgcaggcgtggccttcccctactttggcggcattgaaaatccgcattttcgcagcgtaaaacacaatccggtgctggtgcgccaattgcccgttaaaaacctgacgttagtcgatggcaacacctgtccggtggtcagcgtttatgatttggtactggcgaattacggcctcgatcgcgggctggaagatgaaaacagtgcgaaagattacgctgaaatcaaaccgtacaccccagcctggggtgagcaaattaccggcgtgccgcgccagtatattgaaaccatcgcccgtgaatttgccgataccgcccataaaacgcatgggcgctcgatgattatcctcggcgcaggtgttaaccactggtatcacatggacatgaactaccgcgggatgatcaatatgctgatcttctgcggttgtgtcgggcaaagcggtggcggctgggcacactatgtcggccaggaaaaactgcgcccacaaaccggctggttgccactggcctttgcgctcgactggaaccgaccaccgcgccaaatgaacagcacctcgtttttctacaatcattccagccaatggcgctatgaaaaagtctctgctcaggagttactttcaccgctcgccgatgccagtaagtacagcggtcatctgattgatttcaacgttcgcgccgaacgtatgggctggctaccttctgcgccgcagctggggcgtaacccgctcgggattaaagctgaagccgacaaggccggattatcccccacagaatttaccgcccaggcgctgaaatcgggcgatttacgtatggcctgcgaacaaccagatagcagcagcaatcatccgcgtaatttgtttgtctggcgctctaacctgcttggctcctccggcaaaggccacgagtatatgcagaagtatctgctggggaccgaaagcgggattcagggcgaggaactcggtgccagcgacgggatcaaaccggaagaagtcgagtggcaaactgcagcgattgaaggcaagctcgacctgctggtgacgctcgacttccgcatgtccagtacctgcctgttctccgatatcgttctgcccaccgccacctggtacgaaaaagacgatatgaacacctcggatatgcatccgtttattcatccgctttctgcggcggtcgatccggcgtgggaatcacgcagcgactgggaaatctacaaaggtatcgccaaagcattttcgcaagtgtgcgtgggtcatcttggcaaagaaaccgacgtggtattacaacccctactgcatgactctccggcagagctctcacagccgtgtgaagtgctcgactggcgcaaaggcgaatgcgatctgattccaggcaaaaccgcgccgaatattgtggcggtggagcgcgactaccctgctacgtatgaacgctttacctcgctcgggccattgatggacaaacttggcaatggcggtaaagggatttcgtggaatacccaggatgaaatcgatttcctcggcaaactcaattacaccaagcgtgatggcccggcacaggggcgtccgctgattgacaccgccattgacgcttcagaagtgattctggcactggcaccggaaaccaacggtcatgttgcagtcaaagcgtggcaggcgctgggcgagatcaccgggcgcgaacatacccatctggcgctgcacaaagaggacgagaagattcgctttcgcgatattcaggcgcagccgcgtaaaattatctccagccccacctggtccggtctggaaagcgatcacgtctcctataacgcgggatacaccaacgttcatgagttaattccgtggcgcacgctgtcgggacgccagcagctctatcaggatcatccgtggatgcgtgcttttggtgaaagcctggtggcttatcgcccgcctatcgacacccgtagcgtcagtgagatgcgccagataccgccaaacggcttcccggaaaaagcacttaacttcctgacgccgcaccagaaatggggcattcactcaacctacagtgaaaacctgctaatgctgacgctctctcgcggtggaccgattgtctggatcagcgaaacagatgcccgagaactgaccattgtcgataacgactgggtggaagtattcaacgccaacggcgcgctgactgcccgcgcggtggtcagccaacgtgtaccgccgggcatgaccatgatgtatcacgcccaggaacgcattatgaatattcctggttcggaagtaactggcatgcgcggcggcattcataactcggttacccgcgtttgcccgaaaccaacgcatatgattggcggttacgcgcagctggcctggggctttaactactacggcaccgtcggatcgaaccgcgatgagttcatcatgatccgcaagatgaagaacgttaactggctggatgatgaaggtcgcgatcaggtacaggaggcgaaaaaatga

SEQ ID NO: 157 - DNA, 498 bp, Escherichia coli
  CDS (1)...(498)
atggatttgtcacagctaacaccacgtcgtccctatctgctgcgtgcattctatgagtggttgctggataaccagctcacgccgcacctggtggtggatgtgacgctccctggcgtgcaggttcctatggaatatgcgcgtgacgggcaaatcgtactcaacattgcgccgcgtgctgtcggcaatctggaactggcgaatgatgaggtgcgctttaacgcgcgctttggtggcattccgcgtcaggtttctgtgccgctggctgccgtgctggctatctacgcccgtgaaaatggcgcaggcacgatgtttgagcctgaagctgcctacgatgaagataccagcatcatgaatgatgaagaggcatcggcagacaacgaaaccgttatgtcggttattgatggcgacaagccagatcacgatgatgacactcatcctgacgatgaacctccgcagccaccacgcggtggtcgaccggcattacgcgttgtgaagtaa

SEQ ID NO: 158 - DNA, 639 bp, Escherichia coli
  CDS (1)...(639)
atggctgtcgctgccaacaaacgttcggtaatgacgctgttttccggtcctactgacatctatagccatcaggtccgcattgtgctggctgagaaaggtgtaagtttcgagatcgaacacgtggaaaaggacaatccgcctcaggatctgattgacctcaacccgaatcagagcgttccgaccctggtggatcgtgagctgaccctgtgggaatctcgcatcattatggaatatctggatgagcgtttcccgcatccgccactgatgcctgtttacccggtagctcgcggtgaaagccgtctgtacatgcatcgcatcgaaaaagactggtacacgctgatgaacaccatcatcaacggttcagcttctgaagcagatgccgcacgtaagcaactgcgcgaagaactgctggcgattgcgccggtcttcggtcagaagccgtacttcctgagcgatgagttcagcctggtcgattgctatcttgctccgctgctgtggcgtctgccgcaactgggcatcgagttcagcggcccgggtgcgaaagagctgaaaggctatatgacccgcgtctttgagcgtgactctttccttgcttctttaactgaagcagaacgtgaaatgcgtctgggccggagttaa

SEQ ID NO: 159 - DNA, 1518 bp, Escherichia coli
  CDS (1)...(1518)
atgtctgaacaacacgcacagggcgctgacgcggtagtcgatcttaacaatgaactgaaaacgcgtcgtgagaagctggcgaacctgcgcgagcaggggattgccttcccgaacgatttccgtcgcgatcatacctctgaccaattgcacgcagaattcgacggcaaagagaacgaagaactggaagcgctgaacatcgaagtcgccgttgctggccgcatgatgacccgtcgtattatgggtaaagcgtctttcgttaccctgcaggacgttggcggtcgcattcagctgtacgttgcccgtgacgatctcccggaaggcgtttataacgagcagttcaaaaaatgggacctcggcgacatcctcggcgcgaaaggtaagctgttcaaaaccaaaaccggcgaactgtctatccactgcaccgagttgcgtctgctgaccaaagcactgcgtccgctgccggataaattccacggcttgcaggatcaggaagcgcgctatcgtcagcgttatctcgatctcatctccaacgatgaatcccgcaacacctttaaagtgcgctcgcagatcctctctggtattcgccagttcatggtgaaccgcggctttatggaagttgaaacgccgatgatgcaggtgatccctggcggtgccgctgcgcgtccgtttatcacccaccataacgcgctggatctcgacatgtacctgcgtatcgcgccggaactgtacctcaagcgtctggtggttggtggcttcgagcgtgtattcgaaatcaaccgtaacttccgtaacgaaggtatttccgtacgtcataacccagagttcaccatgatggaactctacatggcttacgcagattacaaagatctgatcgagctgaccgaatcgctgttccgtactctggcacaggatattctcggtaagacggaagtgacctacggcgacgtgacgctggacttcggtaaaccgttcgaaaaactgaccatgcgtgaagcgatcaagaaatatcgcccggaaaccgacatggcggatctggacaacttcgactctgcgaaagcaattgctgaatctatcggcatccacgttgagaagagctggggtctgggccgtatcgttaccgagatcttcgaagaagtggcagaagcacatctgattcagccgaccttcattactgaatatccggcagaagtttctccgctggcgcgtcgtaacgacgttaacccggaaatcacagaccgctttgagttcttcattggtggtcgtgaaatcggtaacggctttagcgagctgaatgacgcggaagatcaggcgcaacgcttcctggatcaggttgccgcgaaagacgcaggtgacgacgaagcgatgttctacgatgaagattacgtcaccgcactggaacatggcttaccgccgacagcaggtctgggaattggtatcgaccgtatggtaatgctgttcaccaacagccataccatccgcgacgttattctgttcccggcgatgcgtccggtaaaataa

SEQ ID NO: 160 - DNA, 1098 bp, Escherichia coli
  CDS (1)...(1098)
atgtttgaaattaatccggtaaataatcgcattcaggacctcacggaacgctccgacgttcttagggggtatcttgactacgacgccaagaaagagcgtctggaagaagtaaacgccgagctggaacagccggatgtctggaacgaacccgaacgcgcacaggcgctgggtaaagagcgttcctccctcgaagccgttgtcgacaccctcgaccaaatgaaacaggggctggaagatgtttctggtctgctggaactggctgtagaagctgacgacgaagaaacctttaacgaagccgttgctgaactcgacgccctggaagaaaaactggcgcagcttgagttccgccgtatgttctctggcgaatatgacagcgccgactgctacctcgatattcaggcggggtctggcggtacggaagcacaggactgggcgagcatgcttgagcgtatgtatctgcgctgggcagaatcgcgtggtttcaaaactgaaatcatcgaagagtcggaaggtgaagtggcgggtattaaatccgtgacgatcaaaatctccggcgattacgcttacggctggctgcgtacagaaaccggcgttcaccgcctggtgcgtaaaagcccgtttgactccggcggtcgtcgccacacgtcgttcagctccgcgtttgtttatccggaagttgatgatgatattgatatcgaaatcaacccggcggatctgcgcattgacgtttatcgcacgtccggcgcgggcggtcagcacgttaaccgtaccgaatctgcggtgcgtattacccacatcccgaccgggatcgtgacccagtgccagaacgaccgttcccagcacaagaacaaagatcaggccatgaagcagatgaaagcgaagctttatgaactggagatgcagaagaaaaatgccgagaaacaggcgatggaagataacaaatccgacatcggctggggcagccagattcgttcttatgtccttgatgactcccgcattaaagatctgcgcaccggggtagaaacccgcaacacgcaggccgtgctggacggcagcctggatcaatttatcgaagcaagtttgaaagcagggttatga

SEQ ID NO: 161 - DNA, 1734 bp, Escherichia coli
  CDS (1)...(1734)
gtgaaacaacagatacaacttcgtcgccgtgaagtcgatgaaacggcagacttgcccgctgaattgcctcccttgctgcgccgtttatacgccagccggggagtacgcagtgcgcaagaactggaacgcagtgttaaaggtatgctgccctggcagcaactgagcggcgtcgaaaaggccgttgagatcctttacaacgcttttcgcgaaggaacgcggattattgtggtcggtgatttcgacgccgacggcgcgaccagcacggctctaagcgtgctggcgatgcgctcgcttggttgcagcaatatcgactacctggtaccaaaccgtttcgaagacggttacggcttaagcccggaagtggtcgatcaggcccatgcccgtggcgcgcagttaattgtcacggtggataacggtatttcctcccatgcgggggttgagcacgctcgctcgttgggcatcccggttattgttaccgatcaccatttgccaggcgacacattacccgcagcggaagcgatcattaaccctaacttgcgcgactgtaatttcccgtcgaaatcactggcaggcgtgggtgtggcgttttatctgatgctggcgctgcgcacctttttgcgcgatcagggctggtttgatgagcgtaacatcgcaattcctaacctggcagaactgctggatctggtcgcgctggggacagtggcggacgtcgtgccgctggacgctaataatcgcattctgacctggcaggggatgagtcgcatccgagccggaaagtgccgtccggggattaaagcgctgcttgaagtggcaaaccgtgatgcacaaaaactcgccgccagcgatttaggttttgcgctggggccacgtctcaatgctgccggacgactggacgatatgtccgtcggtgtggcgctgttgttgtgcgacaacatcggcgaagcgcgcgtgctggcaaatgaactcgatgcgctaaaccagacgcgaaaagagatcgaacaaggaatgcaaattgaagccctgaccctgtgcgagaaactggagcgcagccgtgacacgctacccggcgggctggcaatgtatcaccccgaatggcatcagggcgttgtcggtattctggcttcgcgcatcaaagagcgttttcaccgtccggttatcgcgtttgcgccagcaggtgacggtacgctgaaaggttccggtcgctccattcaggggctgcatatgcgtgatgcgctggagcgattagacacactctaccctggcatgatgctgaagtttggcggtcatgcgatggcggcgggtttgtcgctggaagaggataaattcaaactctttcaacaacggtttggcgaactggttactgagtggctggacccttcgctattgcaaggcgaagtggtatcagacggtccgttaagcccggccgaaatgaccatggaagtggcgcagctgctgcgcgatgctggcccgtgggggcagatgttcccggagccgctgtttgacggtcatttccgtctgctgcaacagcggctggtgggcgaacgtcatttgaaggtgatggtcgaaccggtcggcggcggtccactgctggatggtattgcttttaatgtcgataccgccctctggccggataacggcgtgcgcgaagtgcaactggcttataagctcgatatcaacgagtttcgcggcaaccgcagcctgcaaattatcatcgacaatatctggccaatttag

SEQ ID NO: 162 - DNA, 711 bp, Escherichia coli
  CDS (1)...(711)
atgaagaaaggttttatgttgtttactttgttagcggcgttttcaggctttgctcaggctgatgacgcggcaattcaacaaacgttagccaaaatgggcatcaaaagcagcgatattcagcccgcgcctgtagctggcatgaagacagttctgactaacagcggcgtgttgtacatcaccgatgatggtaaacatatcattcaggggccaatgtatgacgttagtggcacggctccggtcaatgtcaccaataagatgctgttaaagcagttgaatgcgcttgaaaaagagatgatcgtttataaagcgccgcaggaaaaacacgtcatcaccgtgtttactgatattacctgtggttactgccacaaactgcatgagcaaatggcagactacaacgcgctggggatcaccgtgcgttatcttgctttcccgcgccaggggctggacagcgatgcagagaaagaaatgaaagctatctggtgtgcgaaagataaaaacaaagcgtttgatgatgtgatggcaggtaaaagcgtcgcaccagccagttgcgacgtggatattgccgaccattacgcacttggcgtccagcttggcgttagcggtactccggcagttgtgctgagcaatggcacacttgttccgggttaccagccgccgaaagagatgaaagaattcctcgacgaacaccaaaaaatgaccagcggtaaataa

SEQ ID NO: 163 - DNA, 897 bp, Escherichia coli
  CDS (1)...(897)
gtgaaacaggatctggcacgcatcgagcagtttcttgatgctctgtggctggaaaaaaatctggctgaaaatacgttgaacgcttaccgtcgcgatctgtcaatgatggtggagtggttgcatcaccgcgggttgacgctggcgacggcgcaaagtgacgatttgcaggcattactggcagaacggctggagggcgggtataaagccaccagctcagcgcgtttgctgagtgcagtgcgccgattgttccagtatctttatcgcgaaaagtttcgtgaagacgatcccagtgcgcatctcgcttcaccgaaattgccccagcgtttgccaaaagatttaagcgaagcgcaggtcgaacgtttattacaggcaccattaatcgatcagccactggagctacgcgataaagccatgcttgaagtgttgtatgctaccgggctgcgtgtctctgaactggtcggactgacaatgagtgatatcagcctgcgtcagggcgtggtacgggtcattggtaaaggcaacaaagagcgtctggtgccgttaggtgaagaggcggtttactggctggaaacctatctggaacatgggcgtccgtggctgctgaatggtgtgtcaattgacgtgttgtttcccagccagcgtgcgcagcagatgacgcgacagaccttctggcaccgtattaaacattatgctgtgctggcgggtatcgacagcgaaaagctgtcaccgcatgtgttgcgtcacgcttttgccactcatttattaaatcatggtgcggatttacgcgtggtgcagatgctactgggccacagcgatctctccaccacgcaaatttatacgcatgtcgctaccgagcgtctgcggcaacttcatcaacagcatcacccgcgggcgtga

SEQ ID NO: 164 - DNA, 1104 bp, Escherichia coli
  CDS (1)...(1104)
atgagtgacagccagacgctggtggtaaaactcggcaccagtgtgctaacaggcggatcgcgccgtctgaaccgtgcccatatcgttgaacttgttcgccagtgcgcgcagttacatgccgccgggcatcggattgttattgtgacgtcgggcgcgatcgccgccggacgtgagcacctgggttacccggaactgccagcgaccatcgcctcgaaacaactgctggcggcggtagggcagagtcgactgattcaactgtgggaacagctgttttcgatttatggcattcacgtcgggcaaatgctgctgacccgtgctgatatggaagaccgtgaacgcttcctgaacgcccgcgacaccctgcgagcgttgctcgataacaatatcgttccggtaatcaatgagaacgatgctgtcgctacggcagagattaaggtcggcgataacgataacctttctgcgctggcggcgattcttgcgggtgccgataaactgttgctgctgaccgatcaaaaaggtttgtataccgctgacccgcgcagcaatccgcaggcagaactgattaaagatgtttacggcattgatgacgcactgcgcgcgattgccggtgacagcgtttcaggcctcggaactggcggcatgagtaccaaattgcaggccgctgacgtggcttgccgtgcgggtatcgacaccattattgccgcgggcagcaagccgggcgttattggtgatgtgatggaaggcatttccgtcggtacgctgttccatgcccaggcgactccgcttgaaaaccgtaaacgctggattttcggtgcgccgccggcgggtgaaatcacggtagatgaaggggcaactgccgccattctggaacgcggcagctccctgttgccgaaaggcattaaaagcgtgactggcaatttctcgcgtggtgaagtcatccgcatttgcaacctcgaaggccgcgatatcgcccacggcgtcagtcgttacaacagcgatgcattacgccgtattgccggacaccactcgcaagaaattgatgcaatactgggatatgaatacggcccggttgccgttcaccgtgatgacatgattacccgttaa

SEQ ID NO: 165 - DNA, 1254 bp, Escherichia coli
  CDS (1)...(1254)
atgctggaacaaatgggcattgccgcgaagcaagcctcgtataaattagcgcaactctccagccgcgaaaaaaatcgcgtgctggaaaaaatcgccgatgaactggaagcacaaagcgaaatcatcctcaacgctaacgcccaggatgttgctgacgcgcgagccaatggccttagcgaagcgatgcttgaccgtctggcactgacgcccgcacggctgaaaggcattgccgacgatgtacgtcaggtgtgcaacctcgccgatccggtggggcaggtaatcgatggcggcgtactggacagcggcctgcgtcttgagcgtcgtcgcgtaccgctgggggttattggcgtgatttatgaagcgcgcccgaacgtgacggttgatgtcgcttcgctgtgcctgaaaaccggtaatgcggtgatcctgcgcggtggcaaagaaacgtgtcgcactaacgctgcaacggtggcggtgattcaggacgccctgaaatcctgcggcttaccggcgggtgccgtgcaggcgattgataatcctgaccgtgcgctggtcagtgaaatgctgcgtatggataaatacatcgacatgctgatcccgcgtggtggcgctggtttgcataaactgtgccgtgaacagtcgacaatcccggtgatcacaggtggtataggcgtatgccatatttacgttgatgaaagtgtagagatcgctgaagcattaaaagtgatcgtcaacgcgaaaactcagcgtccgagcacatgtaatacggttgaaacgttgctggtgaataaaaacatcgccgatagcttcctgcccgcattaagcaaacaaatggcggaaagcggcgtgacattacacgcagatgcagctgcactggcgcagttgcaggcaggccctgcgaaggtggttgctgttaaagccgaagagtatgacgatgagtttctgtcattagatttgaacgtcaaaatcgtcagcgatcttgacgatgccatcgcccatattcgtgaacacggcacacaacactccgatgcgatcctgacccgcgatatgcgcaacgcccagcgttttgttaacgaagtggattcgtccgctgtttacgttaacgcctctacgcgttttaccgacggcggccagtttggtctgggtgcggaagtggcggtaagcacacaaaaactccacgcgcgtggcccaatggggctggaagcactgaccacttacaagtggatcggcattggtgattacaccattcgtgcgtaa

SEQ ID NO: 166 - DNA, 561 bp, Escherichia coli
  CDS (1)...(561)
atgatgacaaggcaggcatcaatgaaaggcttcccaattgcgcatatttttcacccttcaatcccgccaatgcacgcagtggttaacaatcacaatagaaatattgattattggacggtaaaaagaaagtttgcagaaattgtctccaccaatgacgttaataaaatttacagtataagtaatgaactgcggagagtattatctgcaataactgcattgaatttctatcatggcgatgttccttctgtcatgatccgaatccaaccggaaaatatgagtccattcattatagatatttctacaggagaacatgatgattatatcatacaaacattagatgtaggcacttttgcaccttttggtgaacaatgtacttgctcagccgtcaataaaaaagagctggaatgtattaaggagacgatttctaagtattgtgcaaaattcacccgaaaagaagccatcttaaccccccttgtgcactttaataaaaccagcattacttcagattgttggcaaattctctttttttcacccgatcattttaataatgatttttattga

SEQ ID NO: 167 - DNA, 1188 bp, Escherichia coli
  CDS (1)...(1188)
atgttccctgtttcatcaattggtaatgatattagtagtgatttagtccgtcgaaaaatgaatgaccttcctgaaagcccaacaggaaataacctcgaagcactagcaccaggtatagaaaaactaaaacagacctctattgaaatggtcactttacttaacacgttacaacctggtggaaaatgcattatcactggtgattttcaaaaagaattagcgtacttacaaaatgtaattctttataatgtctcgtctcttcgtctggattttttaggttataacgcccaaattattcaacgatcggacaatacttgtgaacttaccattaatgaaccgttaaaaaaccaggaaatatccacaggtaatatcaatattaattgcccattaaaagatatttacaatgaaatcaggaggttaaacgtaatttttagttgtgggactggagatatcgttgatctatcctctctggacttacgtaatgtcgatttagattattatgatttcacagataaacatatggctaatactattttaaatccttttaaattgaattcaacaaattttactaatgccaacatgtttcaggttaattttgttagttcaacacaaaacgccacaatctcctgggattatttactaaaaataacgcctgttttaataagcattagcgatatgtattctgaagaaaaaatcaagtttgtcgaaagttgtttaaatgagcctggagacattaccgaagaacaattaaaaattatgagatttgcaattataaaatctataccaagggcaactcttacagataaattagaaaatgaattaacaaaagaaatatataaaagctcatcgaaaatcatcaattgcttgaacagaattaaattaacagagatgaaagaattctcatcagaaaaaatatatgattacatcgatataatcattgaagattatgaaaataccaaagaaaatgcttatctggtcgtcccccaaattaattatactatggatttaaacatagaagactctagctcagaagagttactttcagataataccctcgagaaagacgaaaattctccggacaatggctttgaggtcggggaatataacacatatgaagcatataactcagagaagcaatattttaccagagaggactatacgtatgattacgaccttttaaatgcaatatag

SEQ ID NO: 168 - DNA, 948 bp, Escherichia coli
  CDS (1)...(948)
gtgtgtcatcgcgcatttcgacttcatctttgcaaggactgggttttcatgttttctgggctgttaatcattctggttcccctgattgtgggttacctcattccgcttcgccaacaagctgcgttaaaagttattaatcagctattaagctggatggtttaccttattctcttttttatgggtatcagtctggcgtttctcgataacctcgccagtaacctgttggcgattctgcattattctgccgtcagtattaccgttattttactgtgtaatattgccgccctgatgtggctggagcgaggcctgccgtggcgcaaccaccatcagcaagaaaaactcccgtcgcgtattgcgatggcgctggagtcgctaaaactgtgcggcgtagtagtgattggttttgccattggtctaagtggactggctttcttacaacacgcgaccgaagccagtgaatacacgttaattttgctacttttcctcgttggtattcagttgcgcaataatggcatgaccttaaagcagattgtccttaatcgccggggaatgattgtcgccgtggtggtggttgtcagttcattaattggtggtttaattaacgcctttattcttgatctccccatcaataccgcgctggcaatggcctccggtttcggctggtattctctttccggtattttattgaccgaatcttttggtccggtaatcgggagcgcggcgttttttaatgatctggcccgtgaactgattgctattatgttgatccctgggctgattcgccgcagccgctctactgcactgggcttatgcggtgccacatcaatggatttcaccctgcccgttcttcaacgtactggcgggctggatatggtcccggcggcaattgttcacggttttattcttagcctgttagtgccgatcctcatcgcctttttctctgcgtaa

SEQ ID NO: 169 - DNA, 291 bp, Escherichia coli
  CDS (1)...(291)
atgcaaaacacaactcatgacaacgtaattctggagctcaccgttcgcaaccatccgggcgtaatgacccacgtttgtggcctttttgcccgccgcgcttttaacgttgaaggcattctttgtctgccgattcaggacagcgacaaaagccatatctggctactggtcaatgacgaccagcgtctggagcagatgataagccaaatcgataagctggaagatgtcgtgaaagtgcagcgtaatcagtccgatccgacgatgtttaacaagatcgcggtgttttttcagtaa

SEQ ID NO: 170 - DNA, 1689 bp, Escherichia coli
  CDS (1)...(1689)
atggcaagttcgggcacaacatcgacgcgtaagcgctttaccggcgcagaatttatcgttcatttcctggaacagcagggcattaagattgtgacaggcattccgggcggttctatcctgcctgtttacgatgccttaagccaaagcacgcaaatccgccatattctggcccgtcatgaacagggcgcgggctttatcgctcagggaatggcgcgcaccgacggtaaaccggcggtctgtatggcctgtagcggaccgggtgcgactaacctggtgaccgccattgccgatgcgcggctggactccatcccgctgatttgcatcactggtcaggttcccgcctcgatgatcggcaccgacgccttccaggaagtggacacctacggcatctctatccccatcaccaaacacaactatctggtcagacatatcgaagaactcccgcaggtcatgagcgatgccttccgcattgcgcaatcaggccgcccaggcccggtgtggatagacattcctaaggatgtgcaaacggcagtttttgagattgaaacacagcccgctatggcagaaaaagccgccgcccccgcctttagcgaagaaagcattcgtgacgcagcggcgatgattaacgctgccaaacgcccggtgctttatctgggcggcggtgtgatcaatgcgcccgcacgggtgcgtgaactggcggagaaagcgcaactgcctaccaccatgactttaatggcgctgggcatgttgccaaaagcgcatccgttgtcgctgggtatgctggggatgcacggcgtgcgcagcaccaactatattttgcaggaggcggatttgttgatagtgctcggtgcgcgttttgatgaccgggcgattggcaaaaccgagcagttctgtccgaatgccaaaatcattcatgtcgatatcgaccgtgcagagctgggtaaaatcaagcagccgcacgtggcgattcaggcggatgttgatgacgtgctggcgcagttgatcccgctggtggaagcgcaaccgcgtgcagagtggcaccagttggtagcggatttgcagcgtgagtttccgtgtccaatcccgaaagcgtgcgatccgttaagccattacggcctgatcaacgccgttgccgcctgtgtcgatgacaatgcaattatcaccaccgacgttggtcagcatcagatgtggaccgcgcaagcttatccgctcaatcgcccacgccagtggctgacctccggtgggctgggcacgatgggttttggcctgcctgcggcgattggcgctgcgctggcgaacccggatcgcaaagtgttgtgtttctccggcgacggcagcctgatgatgaatattcaggagatggcgaccgccagtgaaaatcagctggatgtcaaaatcattctgatgaacaacgaagcgctggggctggtgcatcagcaacagagtctgttctacgagcaaggcgtttttgccgccacctatccgggcaaaatcaactttatgcagattgccgccggattcggcctcgaaacctgtgatttgaataacgaagccgatccgcaggcttcattgcaggaaatcatcaatcgccctggcccggcgctgatccatgtgcgcattgatgccgaagaaaaagtttacccgatggtgccgccaggtgcggcgaatactgaaatggtgggggaataa

SEQ ID NO: 171 - DNA, 99 bp, Escherichia coli
  CDS (1)...(99)
atgactacttccatgctcaacgcaaaactactaccaactgcgccatccgccgcagtggtcgtcgtgcgtgtggtggtggtcgtcggcaatgcgccgtag

SEQ ID NO: 172 - DNA, 1017 bp, Escherichia coli
  CDS (1)...(1017)
atgtttgtcatctggagccatagaacagggttcatcatgagtcatcaacttaccttcgccgacagtgaattcagcagtaagcgccgtcagaccagaaaagagattttcttgtcccgcatggagcagattctgccatggcaaaacatggtggaagtcatcgagccgttttaccccaaggctggtaatggccggcgaccttatccgctggaaaccatgctacgcattcactgcatgcagcattggtacaacctgagcgatggcgcgatggaagatgctctgtacgaaatcgcctccatgcgtctgtttgcccggttatccctggatagcgccttgccggaccgcaccaccatcatgaatttccgccacctgctggagcagcatcaactggcccgccaattgttcaagaccatcaatcgctggctggccgaagcaggcgtcatgatgactcaaggcaccttggtcgatgccaccatcattgaggcacccagctcgaccaagaacaaagagcagcaacgcgatccggagatgcatcagaccaagaaaggcaatcagtggcactttggcatgaaggcccacattggtgtcgatgccaagagtggcctgacccacagcctggtcaccaccgcggccaacgagcatgacctcaatcagctgggtaatctgctgcatggagaggagcaatttgtctcagccgatgccggctaccaaggggcgccacagcgcgaggagctggccgaggtggatgtggactggctgatcgccgagcgccccggcaaggtaagaaccttgaaacagcatccacgcaagaacaaaacggccatcaacatcgaatacatgaaagccagcatccgggccagggtggagcacccatttcgcatcatcaagcgacagttcggcttcgtgaaagccagatacaaggggttgctgaaaaacgataaccaactggcgatgttattcacgctggccaacctgtttcgggcggaccaaatgatacgtcagtgggagagatctcactaa

SEQ ID NO: 173 - DNA, 474 bp, Escherichia coli
  CDS (1)...(474)
atggtatatataataatcgtttcccacggacatgaagactacatcaaaaaattactcgaaaatcttaatgctgacgatgagcactacaagattatcgtacgcgacaacaaagactctctattattgaaacaaatatgccagcattatgcaggcctggactatattagtggaggtgtatacggctttggtcataataataatattgcggtggcgtatgtaaaggaaaaatatagacccgcagatgatgattacattttgtttttgaatcccgatatcatcatgaagcatgatgatttgctgacatatattaaatatgtcgaaagtaagcgttatgcttttagtacattatgcctgttccgagatgaagcgaaatctttacatgattattccgtaagaaaatttcctgtgctttctgattttattgtgtcatttatgttagggattaaggaaggtgcgaacaagtccctgatatga

SEQ ID NO: 174 - DNA, 1119 bp, Escherichia coli
  CDS (1)...(1119)
atgggaaaaagcatagtcgttgtttctgcggtcaattttaccactggcggtccatttaccattttgaaaaaatttttggcagcaactaataataaagaaaatgtcagttttatcgcattagtccattctgctaaagagttaaaagaaagttatccatgggttaaattcattgagtttcctgaggttaaagggtcgtggctaaaacgtttgcactttgaatatgtagtttgtaaaaaactttcaaaagagctgaatgctacgcattggatttgtctgcatgatattacggccaatgtcgtcactaaaaaaagatatgtgtattgtcataaccctgcacctttttataaaggaattttattccgtgaaattcttatggagcctagctttttcttatttaaaatgctatacgggctgatatataaaataaacattaaaaaaaatactgcagtgtttgttcaacaattctggatgaaagaaaaatttatcaagaaatattctataaataacatcattgtcagtcggccagaaattaaattatctgataaaagccaacttactgatgatgattctcaatttaagaataacccttctgagttgacaatattttaccctgctgttccacgagtatttaaaaattacgagcttattattagtgcagcaaggaaattgaaagaacaatccaatattaaatttctgcttactatcagtggtacagaaaatgcgtatgcaaaatatattatcagtcttgcagaaggactggataatgttcatttcctcgggtacttggataaagaaaaaatcgatcattgttataatatttcagatatagtttgttttccctctaggttagaaacatggggattgccgttgtctgaagctaaagagcgaggtaagtgggtattagcatcagatttcccatttactagagaaactcttggtagttatgaaaagaaagctttttttgattctaataacgatgacatgttagttaaacttattattgacttcaaaaaaggtaacctcaaaaaagatatctctgatgcaaatttcatttatcgtaatgaaaatgtattagttgggtttgatgaactagttaattttattactgaagaacattga

SEQ ID NO: 175 - DNA, 591 bp, Escherichia coli
  CDS (1)...(591)
atgatcttaaaactcgctaaacgatatggtctctgtggttttattcggcttgttagagatgtcttattgactcgtgtattttaccggaactgtagaattattcgatttccctgctatattcgcaatgatggtagcattaattttggtgaaaatttcacaagtggagtcggtctcaggctggatgcatttggacgtggcgtgatttttttttccgataatgtgcaagttaacgactatgttcatatcgcctcaattgagagcgttacgataggtcgggatacgcttattgcaagtaaagtatttattaccgatcataatcacggttcctttaagcactctgatccaatgagttcgccaaatatacctccagacatgcgcacgttggaatcttcagctgttgtaattggccagagggtttggttgggtgagaatgtgacggttttgcctggaacaattattggtaatggagtcgtagtcggcgccaattctgttgttagaggttctattcccgaaaatactgtcattgcgggagtaccagcaaaaatcataaagaaatacaatcatgagaccaaattatgggaaaaagcatag

SEQ ID NO: 176 - DNA, 993 bp, Escherichia coli
  CDS (1)...(993)
atgtattttttgaatgatttaaatttctctagacgcgatgctggatttaaagcaagaaaagatgcactggacattgcttcagattatgaaaacatttctgttgttaacattcctctatggggtggagtagtccagagaattattagttctgttaagcttagtacatttctctgcggtcttgaaaataaagatgttttaattttcaatttcccgatggccaaaccattttggcatatattgtcattctttcaccgccttctaaaatttagaatagtacctctgattcatgatattgatgaattaagaggaggagggggtagtgattctgtgcggcttgctacctgtgatatggtcataagtcacaatccacaaatgacaaagtaccttagtaaatatatgtctcaggataaaatcaaagacataaaaatatttgattacctcgtctcatctgatgtggagcatcgagatgttacggataagcaacgaggggtcatatatgctggcaacctttctaggcataaatgttctttcatatatactgaaggatgcgattttactctctttggtgtcaactatgaaaataaagataatcctaaatatcttggaagttttgatgctcaatctccggaaaagattaacctcccaggcatgcaatttggactcatttgggatggagattctgtcgaaacctgtagtggtgcctttggcgactatttaaagtttaataaccctcataagacatctctttatctttcaatggaacttccagtatttatatgggataaagccgcccttgcggatttcattgtagataatagaataggatatgcagtgggatcaatcaaagaaatgcaagagattgttgactccatgacaatagaaacttataagcaaattagtgagaatacaaaaattatttctcagaaaattcgaacaggaagttacttcagggatgttcttgaagaggtgatcgatgatcttaaaactcgctaa

SEQ ID NO: 177 - DNA, 1167 bp, Escherichia coli
  CDS (1)...(1167)
atgatctatcttgtaattagtgtctttctcattacagcatttatctgtttatatcttaagaaggatatattttatccagccgtatgcgttaatatcatcttcgcactggtcttattgggatatgaaataacgtcagatatatatgcttttcagttaaatgacgctacgttgatttttctactttgcaatgttttgacatttaccctgtcatgtttattgacggaaagtgtattagatctaaatatcagaaaagtcaataatgctatttatagcataccatcgaagaaagtgcataatgtaggcttgttagttatttctttttcgatgatatatatatgcatgaggttaagtaactaccagttcgggactagcttacttagctatatgaatttgataagagatgctgatgttgaagacacatcaagaaatttctcagcatacatgcagccaatcattctaactacttttgctttatttatttggtctaaaaaatttactaatacaaaggtaagtaaaacatttactttacttgtttttattgtattcatctttgcaattatactgaatactggtaagcaaattgtctttatggttatcatctcttatgcattcatcgtaggtgttaatagagtaaaacattatgtttatcttattacagctgtaggtgttctattctccttgtatatgctctttttacgtggactgcctggggggatggcatattatctatccatgtatttggtcagccctataatcgcgtttcaggagttttattttcagcaagtatctaactctgccagttctcatgtcttttggttttttgaaaggctgatggggctattaacaggtggagtctctatgtcgttgcataaagaatttgtgtgggtgggtttgccaacaaatgtttatactgctttttcggattatgtttatatttccgcggagctaagctatttgatgatggttattcatggctgtatttcaggtgttttatggagattgtctcgaaattacatatctgtgaaaatattttattcatattttatttataccttttctttcattttttatcatgaaagcttcatgactaatattagcagttggatacaaataactctttgtatcatagtattctctcaatttcttaaggcccagaaaataaagtga

SEQ ID NO: 178 - DNA, 1104 bp, Escherichia coli
  CDS (1)...(1104)
atgtacgattatatcattgttggttctggtttgtttggtgccgtttgtgcgaatgagttaaaaaagctaaacaaaaaagttttagtgattgagaaaagaaatcatatcggtggaaatgcgtacacagaggactgtgagggtatccagattcataaatatggtgcacatatttttcataccaatgataaatatatatgggattacgttaatgatttagtagaatttaatcgttttactaattctccactggcgatttataaagacaaattattcaaccttccttttaatatgaatactttccaccaaatgtggggagttaaagatcctcaagaagctcaaaatatcattaatgctcagaaaaaaaagtatggtgacaaggtacctgaaaatttggaggagcaggcgatttcattagttggggaggacttataccaagcattgataaagggttatacggagaagcagtggggaagaagtgcaaaagaattgcctgcatttattattaagcgaatcccagtgagatttacgtttgataacaattatttttccgatcgctatcaaggtattccggtgggaggctacactaagcttattgaaaaaatgcttgaaggtgtggacgtaaaattaggcattgattttttgaaagacaaagattctctagcgagtaaagcccatagaatcatctacactggacccattgatcagtacttcgactataggtttggagcgttagaatatcgctctttaaaatttgagacggaacgccatgaatttccaaacttccaagggaatgcagtaataaatttcactgatgctaatgtaccatataccagaataattgagcataaacattttgactatgttgagacaaagcatacggttgttacaaaagaatatccattagagtggaaagttggcgacgaaccctactatccagttaatgataataaaaacatggagctttttaagaaatatagagagttagctagcagagaagacaaggttatatttggcgggcgtttggccgagtataaatattatgatatgcatcaagtgatatctgccgctctttatcaagtgaaaaatataatgagtacggattaa

SEQ ID NO: 179 - DNA, 693 bp, Escherichia coli
  CDS (1)...(693)
ttgacatcatcaataaccaatgaaattatgcaattatatacggatagggaggttcttaacatggggctttgtagtcgttataaaagtcttacatgcaatagttgctcaatgcattgccaaataatgccagaagagtcaccgcgtttgcagtattgcgcaaactcgtgtttttgtatgtggcccgaagaaagttcatattttaatcgtggtgtggtagaaggtatcttaacaaaaaaccacaatgcgagattaagcggatatatttttgtcgatttttcagtaagttttttacgtctattccttgaaaaagactggattgactatcttgcaagtactgacatggggattgttttagtcagcgaccgcaatatgcaatcgttagctaattactggcgaaaacacaactcagcaatatctgctgtcatatataatgatgatggtcttgatgttgccaatgaaaagatcagacaactatttattggtcgttatttatcatttaccggaggtaacacattaactcagatggaattcaccataatggggtatatggtttctggttataatccatatcagattgctgaagttctggatatggatatccgtagcatctacgcgtacaagcaacgaatcgaaaagagaatgggtggtaaaataaacgaattatttattcgttcacattcggtccaacattga

SEQ ID NO: 180 - DNA, 1176 bp, Escherichia coli
  CDS (1)...(1176)
atgcaaaaactcattaactcagtgcaaaactatgcctggggcagcaaaacggcgttgactgaactttatggtatggaaaatccgtccagccagccgatggccgagctgtggatgggcgcacatccgaaaagcagttcacgagtgcagaatgccgccggagatatcgtttcactgcgtgatgtgattgagagtgataaatcgactctgctcggagaggccgttgccaaacgctttggcgaactgcctttcctgttcaaagtattatgcgcagcacagccactctccattcaggttcatccaaacaaacacaattctgaaatcggttttgccaaagaaaatgccgcaggtatcccgatggatgccgccgagcgtaactataaagatcctaaccacaagccggagctggtttttgcgctgacgcctttccttgcgatgaacgcgtttcgtgaattttccgagattgtctccctactccagccggtcgcaggtgcacatccggcgattgctcactttttacaacagcctgatgccgaacgtttaagcgaactgttcgccagcctgttgaatatgcagggtgaagaaaaatcccgcgcgctggcgattttaaaatcggccctcgatagccagcagggtgaaccgtggcaaacgattcgtttaatttctgaattttacccggaagacagcggtctgttctccccgctattgctgaatgtggtgaaattgaaccctggcgaagcgatgttcctgttcgctgaaacaccgcacgcttacctgcaaggcgtggcgctggaagtgatggcaaactccgataacgtgctgcgtgcgggtctgacgcctaaatacattgatattccggaactggttgccaatgtgaaattcgaagccaaaccggctaaccagttgttgacccagccggtgaaacaaggtgcagaactggacttcccgattccagtggatgattttgccttctcgctgcatgaccttagtgataaagaaaccaccattagccagcagagtgccgccattttgttctgcgtcgaaggcgatgcaacgttgtggaaaggttctcagcagttacagcttaaaccgggtgaatcagcgtttattgccgccaacgaatcaccggtgactgtcaaaggccacggccgtttagcgcgtgtttacaacaagctgtaa

SEQ ID NO: 181 - DNA, 795 bp, Escherichia coli
  CDS (1)...(795)
atgaaacagtatttagaactgatgcaaaaagtgctcgacgaaggcacacagaaaaacgaccgtaccggaaccggaacgctttccatttttggtcatcagatgcgttttaacctgcaagatggattcccgctggtgacaactaaacgttgccacctgcgttccatcatccatgaactgctgtggtttctgcagggcgacactaacattgcttatctacacgaaaacaatgtcaccatctgggacgaatgggccgatgaaaacggcgacctcgggccagtgtatggtaaacagtggcgcgcctggccaacgccagatggtcgtcatattgaccagatcactacggtactgaaccagctgaaaaacgacccggattcgcgccgcattattgtttcagcgtggaacgtaggcgaactggataaaatggcgctggcaccgtgccatgcattcttccagttctatgtggcagacggcaaactctcttgccagctttatcagcgctcctgtgacgtcttcctcggcctgccgttcaacattgccagctacgcgttattggtgcatatgatggcgcagcagtgcgatctggaagtgggtgattttgtctggaccggtggcgacacgcatctgtacagcaaccatatggatcaaactcatctgcaattaagccgcgaaccgcgtccgctgccgaagttgattatcaaacgtaaacccgaatccatcttcgactaccgtttcgaagactttgagattgaaggctacgatccgcatccgggcattaaagcgccggtggctatctaa

SEQ ID NO: 182 - DNA, 876 bp, Escherichia coli
  CDS (1)...(876)
atgaccagtagctatctgcattttccggagtttgatccggtcattttctcaataggacccgtggcgcttcactggtacggcctgatgtatctggtgggtttcatttttgcaatgtggctggcaacacgacgggcgaatcgtccgggcagcggctggaccaaaaatgaagttgaaaacttactctatgcgggcttcctcggcgtcttcctcgggggacgtattggttatgttctgttctacaatttcccgcagtttatggccgatccgctgtatctgttccgtgtctgggacggcggcatgtctttccacggcggcctgattggcgttatcgtggtgatgattatcttcgcccgccgtactaaacgttccttcttccaggtctctgattttatcgcaccactcattccgtttggtcttggtgccgggcgtctgggcaactttattaacggtgaattgtggggccgcgttgacccgaacttcccgtttgccatgctgttccctggctcccgtacagaagatattttgctgctgcaaaccaacccgcagtggcaatccattttcgacacttacggtgtgctgccgcgccacccatcacagctttacgagctgctgctggaaggtgtggtgctgtttattatcctcaacctgtatattcgtaaaccacgcccaatgggagctgtctcaggtttgttcctgattggttacggcgcgtttcgcatcattgttgagtttttccgccagcccgacgcgcagtttaccggtgcctgggtgcagtacatcagcatggggcaaattctttccatcccgatgattgtcgcgggtgtgatcatgatggtctgggcatatcgtcgcagcccacagcaacacgtttcctga

SEQ ID NO: 183 - DNA, 726 bp, Escherichia coli
  CDS (1)...(726)
atggacagtctcaatcttaataaacatatttccggccagttcaacgccgaactggaaagtatccgcacgcaggtgatgaccatgggcggcatggtggagcagcagctttctgatgcaatcaccgcgatgcataaccaggacagcgatctggcgaagcgcgtcatcgaaggcgacaagaacgtcaacatgatggaagtggcgatcgatgaagcctgcgtgcgcattatcgccaaacgtcagccgacggcgagcgacctgcgactggttatggtgatcagtaaaaccattgccgagctggagcgtattggcgacgtggcggacaaaatctgccgtactgcgctggagaaattctcccagcagcatcagccgttgctggtaagtctggagtcgctgggccgtcataccatccagatgctgcacgacgtgctggacgcgttcgcgcggatggacattgacgaagcggtacgtatttatcgtgaagataaaaaagtcgatcaggaatacgaaggtattgttcgtcaactgatgacctacatgatggaagattcgcgtaccattccgagcgtacttactgcgctgttctgcgcgcgttctatcgaacgtattggcgaccgctgccagaatatttgtgagtttatcttctactacgtgaaggggcaggatttccgtcacgtcggtggcgatgagctggataaactgctggcggggaaagatagcgacaaataa

SEQ ID NO: 184 - DNA, 774 bp, Escherichia coli
  CDS (1)...(774)
atgagtatggttgaaactgccccgagtaaaattcaggttcgtaatttgaacttctactacggcaaattccatgccctgaaaaacatcaacctggatatcgctaaaaaccaggtaacggcgtttatcgggccgtccggctgcggtaaatcgacgctgctgcgtaccttcaacaaaatgtttgaactgtacccggagcagcgtgcggaaggtgaaattctgcttgatggcgacaacatcctgaccaactctcaggatatcgcactgctgcgtgcgaaagtgggcatggtgttccagaaaccgacgccgtttccgatgtccatctacgacaacatcgcttttggcgttcgtctgtttgagaagctctcccgtgccgacatggacgagcgcgtgcagtgggcattgaccaaagccgcattgtggaacgaaaccaaagataaattgcaccagagcggttactctctctctggtggtcagcaacagcgtctgtgtattgcgcgtggtatcgccattcgcccggaagtgctgctgctcgacgaaccgtgttcggcgctcgaccctatctctaccgggcgtattgaagagctgatcaccgaactgaagcaggattacaccgtggtgatcgtcacccacaacatgcagcaggctgcgcgttgttccgaccacacggcgtttatgtacctgggcgaattgattgagttcagcaacacggacgatctgttcaccaagccagcgaagaaacaaacagaagactacatcaccggtcgttacggttga

SEQ ID NO: 185 - DNA, 891 bp, Escherichia coli
  CDS (1)...(891)
atggctatggttgaaatgcaaaccactgcggcgctggctgaatctcgccgcaaaatgcaggcgcgtcgccgcctcaaaaaccgtattgcgctgacgctctcgatggcgacgatggccttcggcctgttctggctgatctggattttaatgtccaccatcactcgcggtatcgacggtatgtcgctggcgctgttcactgaaatgacgccgccgcccaatacggaaggtggtggtctggcgaacgctctggcgggtagcgggctgttaattttgtgggccacggtattcggtacgccgctgggcattatggcggggatttatctggcggaatatggtcgtaaatcctggctggcagaagtgattcgcttcattaacgacattctgctctctgcgccgtcgattgtggttggtctgtttgtttacaccattgtggtggcgcagatggagcacttctccggctgggcgggcgtgattgccctggcgttgttgcaggtgccgattgttatccgcaccaccgagaacatgctgaaactggtgccgtacagcctgcgtgaagcggcttatgcgctgggtacaccgaagtggaagatgatctctgcgattacgctgaaagcgtcggtgtccgggattatgaccggtatcctgctggcgattgcccgtattgctggtgaaaccgcgccgctgctgtttaccgcgctctccaaccagttctggagcacggacatgatgcagccgatcgccaacctgccggtgacgatctttaagtttgcgatgagcccgtttgcggaatggcagcaattggcctgggccggggtattgatcattaccctgtgcgtactgctgctgaacattctggcgcgcgttgtttttgcgaagaataaacacggttga

SEQ ID NO: 186 - DNA, 960 bp, Escherichia coli
  CDS (1)...(960)
atggctgcaaccaagcctgcttttaacccaccgggtaaaaagggcgacataattttcagcgtgctggtaaaactggcggcgctgattgtgctattgatgttgggtggcattattgtctctctgatcatctcctcctggccgagcattcagaaatttggtctggctttcctatggaccaaagagtgggatgcaccgaacgatatctacggggcgctggtgccgatctacggtacgttggtgacttcgtttatcgcgctgctgatcgccgtcccggtgagtttcggtatcgccctgttcctgactgagcttgcgcctggctggctgaaacgcccgctgggtatcgccattgagctgctggcagccattccaagtatcgtttacggcatgtggggcctgtttatctttgcgccgctgttcgccgtttactttcaggagccggtcggcaatatcatgtcgaatatcccgattgttggcgcgctgttctctggccccgcatttggtatcggtatcctcgcggcaggcgtgatcctcgccatcatgattattccgtacattgcggcggtaatgcgtgatgtgttcgaacaaaccccggtgatgatgaaagagtcggcctacggtattggctgcaccacctgggaagttatctggcgtatcgttcttccgttcaccaaaaatggtgttatcggcggcatcatgctggggctgggccgcgcgctcggtgaaaccatggcggtgacctttatcatcggtaacacctaccagctcgacagcgcctcgctgtatatgccgggcaacagtatcacctctgcgctggcgaacgaatttgcggaagcggaatccggtctgcacgttgccgcactgatggaactgggcctgatcctgtttgtgattaccttcatcgtcctcgccgcatcgaagtttatgattatgcgcctggctaagaatgagggggcacgctaa

SEQ ID NO: 187 - DNA, 1041 bp, Escherichia coli
  CDS (1)...(1041)
atgaaagttatgcgtaccaccgtcgcaactgttgtcgccgcgaccttatcgatgagtgctttctctgtgtttgcagaagcaagcctgacaggtgcaggtgcaaccttccctgcgccggtgtatgccaaatgggctgacacttaccagaaagaaaccggtaataaagttaactaccagggtatcggttcttccggtggcgtaaaacagattatcgctaataccgttgattttggtgcctctgacgcgccgctgtctgacgaaaaactggctcaggaaggtctgttccagttcccgaccgtgattggcggcgtggtgctggcggttaacattccagggctgaagtctggcgaactggtgctggatggtaaaaccctcggcgacatctacctgggcaaaatcaagaagtgggatgatgaagccatcgccaaactgaatccgggtctgaaactgccttcacaaaacattgctgtagtacgccgcgcagatggctccgggacttccttcgtcttcaccagctacctggcgaaagtgaacgaagagtggaaaaacaacgttggtactggctctaccgtaaaatggccgatcggtctgggcggtaaaggtaacgacggtatcgccgcgttcgttcagcgtctgccgggtgcaattggttatgttgaatatgcttacgcgaagcagaacaacctggcgtacaccaaactgatctccgctgatggtaaaccggttagtccgaccgaagaaaacttcgctaatgcagcaaaaggtgcagactggagcaaaaccttcgctcaggatctgaccaaccagaaaggcgaagatgcatggcctattacctctaccacgttcattctgatccacaaagatcagaagaaaccagaacaaggcacagaagtgctgaaattcttcgactgggcgtacaaaaccggggctaaacaggcgaacgacctggattacgccagcctgccggatagtgtagttgaacaggttcgcgctgcgtggaagaccaatattaaagacagtagcggtaagccgctgtactaa

SEQ ID NO: 188 - DNA, 711 bp, Escherichia coli
  CDS (1)...(711)
atgggatctggactggtgaacggaggtgattatttttataataacctttcattcacagtcaccaggtacaacggcatcatggcaactgactcaacacaatgtgtaaaaaaaagccgtggccgcccaaaagtgttcgacagggatgccgcgcttgataaggccatgaaattgttctggcaacacggttatgaagcgacttctcttgcggacctcgtcgaagcgaccggagccaaagcgcccacgctatacgcggaatttaccaacaaagaggggttatttcgtgccgttctcgaccgctatatcgatcgttttgccgctaagcatgaagcacagctgttttgtgaagagaaaagcgtggagtctgcgctggctgactattttgctgccatcgccaactgctttaccagcaaagacaccccggcaggctgcttcatgatcaacaactgcaccaccctctccccagattcaggagatatcgccaatacgttgaaatcacgccatgcgatgcaagagcgcactttgcagcagtttttatgtcaacgacaagcgcgcggggaaatcccgccccactgtgacgtgacacatctggcagaattccttaattgtattattcaggggatgtcgatcagcgcacgcgaaggtgcatcgctggaaaaactgatgcagattgccggaacgactttgcgtttatggcccgaactggtgaaataa

SEQ ID NO: 189 - DNA, 546 bp, Escherichia coli
  CDS (1)...(546)
gtgcaggccaaaattgcggcatcaaatacgggtgaactggatgccctgcaacagctgggattctccctggtagaaggtgaagttgatttggcgctacccgtgaacaatgccagtgatagcggtgctgtagtggcacaagagaccgatattcccgcattacgtcagttagccagcgccgcatttgcgcaaagccgttttcgtgcgccgtggtatgcgcctgacgccagcagtcgcttttatgcacagtggattgaaaatgccgtgcgcggcacctttgatcatcaatgtctgattttacgtgcggcgtccggcgatattcgcggctatgtctctttacgggaactcaatgcgacagatgcgcgaattggcctgctggctggacgcggtgcaggtgctgagctgatgcaaacggcgctaaactgggcgtatcgtcgcggtaaaacaactttgcgggtggcgacccaaatgggcaacaccgccgcgcttaaacgatacatacaaagtggtgcgaatgtagaaagcaccgcgtactggttatacaggtga

SEQ ID NO: 190 - DNA, 1131 bp, Escherichia coli
  CDS (1)...(1131)
atgattccatttaacgcaccgccggtggtgggaaccgaactcgactatatgcagtcggcaatgggtagcggcaaactgtgtggcgatggcggttttacccgtcgctgccagcagtggctggagcaacgttttggcagcgccaaagtgttactgacgccgtcctgcaccgcttcgctggagatggcggcgctgctgctcgatatccagcctggcgatgaagtgatcatgccgagctacacctttgtctccaccgccaatgcctttgtgctgcgtggcgcaaaaatcgtttttgtggatgttcgcccggacaccatgaacatcgacgaaacgctgattgaagcggcgatcaccgacaaaacgcgcgttatcgtgccggtccattacgcgggtgtggcctgcgaaatggacaccattatggcgttggcgaaaaagcataatttgtttgtggtagaagatgccgctcagggcgtgatgtccacttacaaagggcgtgcactgggaaccattggtcatattggctgctttagcttccatgaaaccaaaaactacacggcgggcggtgaaggcggcgcgacgctgattaacgataaagcgttaatcgaacgagccgagatcatccgtgaaaagggcactaaccgcagccagttcttccgtggtcaggtcgataaatatacctggcgcgatattggctccagctatttgatgtccgatctgcaagctgcatacctgtgggcgcaactggaagcagcggatcgtatcaaccagcaacgtctggcgctgtggcaaaactactacgatgcgttagcgcctctggcgaaagccgggcgtatcgagctgccgtcgattcccgatggctgcgtgcagaacgcgcatatgttctacattaaactgcgggatattgatgaccggagcgcgttgattaactttctgaaagaagcggaaatcatggcggtgtttcattacattccgctgcacggttgccctgcgggggaacactttggtgagttccacggtgaagatcgctacaccaccaaagagagcgagcgcctgctgcgcctgccgctgttctacaacctgtcgcccgtcaatcagcgtacggtaattgcgactttgttgaactacttttcctga

SEQ ID NO: 191 - DNA, 1251 bp, Escherichia coli
  CDS (1)...(1251)
atgtcgttggcaaaagcgtccttgtggacggcggccagtacactggtcaagattggtgccgggttactggtcggtaagttgctggcggtgtcatttggtccggcggggcttgggctggcggcaaatttccgccagttgattaccgtgctcggcgtgcttgccggggctggcatctttaacggtgtaaccaaatacgttgcccagtaccatgataatccgcaacagctgcgccgcgtggtcggcacttcatcagcgatggtacttggtttctctacgctgatggcgctggtttttgtgctggcagctgcgccaatcagccagggattgtttggtaataccgactatcaggggctggtgcgtttagtggcgctggtgcaaatggggatcgcctggggcaacctgttactggcgctgatgaaaggctttcgcgatgccgcaggtaatgcgttatcgctgattgtcggcagcttgattggcgttctcgcgtactacgtcagttaccgtttgggcggttatgaaggggcgttgctgggtctggcgctgattcccgcgctggtggtaattcctgccgccatcatgttgatcaaacgtggtgtcatcccgttaagctatctgaaacccagctgggataacggtctggcagggcagttgagcaaatttacgctcatggcgttgattacgtcggtgaccttgcctgttgcttacatcatgatgcgtaaactgctggcggcgcagtatagctgggatgaggtggggatctggcaaggggtgagcagtatttccgatgcctacctgcaatttattacggcatcgttcagcgtatatttgctgcccacgttgtcgcggctaacggaaaagcgcgatatcacccgggaagtggttaaatcgctgaaattcgtcttaccggcagtggcggcggcgagttttaccgtctggctgctgcgtgattttgctatctggctgctgttgtcgaataaatttaccgctatgcgcgatctctttgcctggcagttagtgggtgatgtgttaaaagtgggcgcttatgtctttggttatctggtgatcgccaaagcgtcactgcggttttatattctggcggaagtcagccagttcactttattgatggtatttgcccactggctaatccctgcgcatggtgcactgggcgcggcgcaggcatatatggcaacttatatcgtctatttttctctttgttgtggcgtgtttttactctggcgtaggcgggcatga

SEQ ID NO: 192 - DNA, 1353 bp, Escherichia coli
  CDS (1)...(1353)
atgagtctgctgcaattcagtggcctgtttgttgtctggctgctctgcacgctgtttattgccacgctgacctggtttgagtttcgccgtgtgcgctttaacttcaatgtcttcttttcattgctgtttttgctcacctttttcttcggcttcccgctgaccagcgtgctggtatttcgctttgatgttggtgtcgcgccgccagaaatcttgttgcaggcgttgctttctgcgggctgcttctacgcggtttactatgtcacctacaaaacccgcctacgcaaacgcgttgctgatgtaccgcgccgtccgctgtttaccatgaaccgcgtggagaccaatcttacgtgggtgatcctgatgggtatcgcgctggtaagcgtcggcatcttcttcatgcacaacggctttttgctgttccggcttaactcctacagtcagatcttttccagtgaagtctccggcgtggcgttaaaacgcttcttttactttttcatcccggcgatgctggtggtctactttctgcgccaggacagcaaagcgtggctgtttttcctcgtcagcacggtcgcctttggcttgctgacttatatgattgtcggcggcactcgcgccaatatcatcatcgcattcgctatcttcctgtttattggcattattcgcggctggatttcgttgtggatgctggcggcggcgggcgtgctggggattgttggcatgttctggctggcactaaaacgctatggaatgaatgtgagcggcgatgaagcgttctatacgtttctctatctcactcgcgacaccttctcgccgtgggagaatctggcgttgctgttgcagaactacgacaacatcgacttccagggcctggctccaattgtccgcgatttctatgtctttatcccttcctggctgtggccgggtcgcccgagtatggtgctgaactcagccaactactttacctgggaagtgctgaataaccactccggactggcgatctcgcctacgcttataggctcactggtggtgatgggcggcgcgttgttcatcccgctcggggcgatcgtggttggtctgatcatcaaatggttcgactggctgtatgagctgggcaaccgcgagcctaatcgctataaagctgcgatattgcacagtttctgctttggggcgatcttcaatatgatcgtgctggcgcgtgaagggctggattcgtttgtctcacgcgtggtcttttttatcgtggtcttcggcgcatgtctgatgatcgcaaaactgttgtactggctttttgaaagcgccggactcattcataaacgtacaaaatcatcgctccggacgcaggttgaaggataa

SEQ ID NO: 193 - DNA, 741 bp, Escherichia coli
  CDS (1)...(741)
atgaataacaacaccacggcaccaacctatacgctgcgtggcttacagttgattggttggcgtgatatgcagcacgccctcgattatctgtttgctgacgggcagcttaagcagggaacgctggttgccattaatgctgaaaaaatgctgactattgaagataacgccgaggtcagggagttaattaacgctgccgaatttaaatatgcggatggcatcagcgttgtacgttcagtacgtaaaaagtacccgcaggcgcaggtttcccgcgttgccggtgccgatctctgggaagagctgatggcgcgcgcaggcaaagaagggacgccggtatttcttgtgggcggtaaacctgaagtgctggcgcaaactgaagctaaactgcgcaaccagtggaatgtgaatatcgttggcagtcaggatggttattttaaacccgagcagcgtcaggcgctgtttgaacgcattcatgccagcggtgcgcaaatcgtcaccgttgcgatgggatcgccaaagcaggagatcatcatgcgcgactgccgtctggtacatccagatgcgctgtatatgggcgttggcgggacttacgatgttttcaccggtcacgtaaaacgcgcaccgaaaatctggcaaacgctggggctggagtggctctaccgcctgctttcgcagccgagccgcattaagcgtcagcttcgtttgctgcgttatttacgctggcactacaccggcaacctatga

SEQ ID NO: 194 - DNA, 225 bp, Escherichia coli
  CDS (1)...(225)
atgactgtactgattcacgtactgggatcggatatccctcaccataaccgaaccgttttgcggtttttcaatgacgcgctggccgcgacgagcgagcacgcgcgcgagtttatggttgttggcaaggacgacggcttaagtgatagctgtccggcgctttctgtgcaatttttcccctgggaaaaaatcgctggcggaagcggtcatcgcgaaagcaaaagctaa

SEQ ID NO: 195 - DNA, 615 bp, Escherichia coli
  CDS (1)...(615)
gtgcggggcgaactgctgttcttcccgacgcggatggacccttcgctcaatacgatggcgaacgatcggcaacgtgaagggaaaatgaccattctggtggggaactccggcgaccgcagcaatgagcatattgctgccttgcgcgccgttcatcagcaatttggcgatacggtaaaagtggtggtgccgatgggatatccgcctaataacgaagcgtacattgaggaagttcgtcaggcggggctggagttattcagcgaagaaaatctacaaattctgagcgaaaaactggaatttgacgcctatctggcgctacttcgtcagtgcgatcttggttactttatttttgcccgccagcagggcattggtacgctgtgcttactgattcaggcgggcattccttgtgtgcttaaccgggaaaatccgttctggcaggatatgacggaacaacatttgccggtgctgtttactaccgacgatctcaacgaggatattgtgcgtgaagcgcagcgccagttggcgtcggtggataaaaacaccattgccttctttagccctaactatctacaaggctggcagcgggcgttggcgattgccgccagggaggtcgcatga

SEQ ID NO: 196 - DNA, 549 bp, Escherichia coli
  CDS (1)...(549)
atgattcggcaacgtcgtcgtgcgttaacgccggaacaacagcaggaaatgggtcaacaagccgctacccggatgatgacttatcccccggtggtgatggcacatacggtcgctgtattcctctcttttgatggcgaactcgacacccagccactcatagaacaactctggcgcgccggtaagcgcgtatatcttccagttttgcatccctttagtgccggtaatttgctgttcctgaattaccatccgcaaagcgaactggtgatgaacaggttgaagatccatgagccaaaattggatgtgcgtgacgtgctacccctttcccgattagacgtgctgatcacaccgctggtcgcctttgatgagtacggtcagcgcctgggaatgggcggtggtttttatgatcggaccttacaaaactggcagcactataaaacgcaaccggtgggttatgcgcatgattgtcagttggtggaaaaactccccgttgaagagtgggatatccctcttcctgcggtggttacaccgtcgaaagtctgggagtggtaa

SEQ ID NO: 197 - DNA, 276 bp, Escherichia coli
  CDS (1)...(276)
atggcacgcgtaactgttcaggacgctgtagagaaaattggtaaccgttttgacctggtactggtcgccgcgcgtcgcgctcgtcagatgcaggtaggcggaaaggatccgctggtaccggaagaaaacgataaaaccactgtaatcgcgctgcgcgaaatcgaagaaggtctgatcaacaaccagatcctcgacgttcgcgaacgccaggaacagcaagagcaggaagccgctgaattacaagccgttaccgctattgctgaaggtcgtcgttaa

SEQ ID NO: 198 - DNA, 2109 bp, Escherichia coli
  CDS (1)...(2109)
ttgtatctgtttgaaagcctgaatcaactgattcaaacctacctgccggaagaccaaatcaagcgtctgcggcaggcgtatctcgttgcacgtgatgctcacgaggggcaaacacgttcaagcggtgaaccctatatcacgcacccggtagcggttgcctgcattctggccgagatgaaactcgactatgaaacgctgatggcggcgctgctgcatgacgtgattgaagatactcccgccacctaccaggatatggaacagctttttggtaaaagcgtcgccgagctggtagagggggtgtcgaaacttgataaactcaagttccgcgataagaaagaggcgcaggccgaaaactttcgcaagatgattatggcgatggtgcaggatatccgcgtcatcctcatcaaacttgccgaccgtacccacaacatgcgcacgctgggctcacttcgcccggacaaacgtcgccgcatcgcccgtgaaactctcgaaatttatagcccgctggcgcaccgtttaggtatccaccacattaaaaccgaactcgaagagctgggttttgaggcgctgtatcccaaccgttatcgcgtaatcaaagaagtggtgaaagccgcgcgcggcaaccgtaaagagatgatccagaagattctttctgaaatcgaagggcgtttgcaggaagcgggaataccgtgccgcgtcagtggtcgcgagaagcatctttattcgatttactgcaaaatggtgctcaaagagcagcgttttcactcgatcatggacatctacgctttccgcgtgatcgtcaatgattctgacacctgttatcgcgtgctgggccagatgcacagcctgtacaagccgcgtccgggccgcgtgaaagactatatcgccattccaaaagcgaacggctatcagtctttgcacacctcgatgatcggcccgcacggtgtgccggttgaggtccagatccgtaccgaagatatggaccagatggcggagatgggtgttgccgcgcactgggcttataaagagcacggcgaaaccagtactaccgcacaaatccgcgcccagcgctggatgcaaagcctgctggagctgcaacagagcgccggtagttcgtttgaatttatcgagagcgttaaatccgatctcttcccggatgagatttacgttttcacaccggaagggcgcattgtcgagctgcctgccggtgcaacgcccgtcgacttcgcttatgcagtgcataccgatatcggtcatgcctgcgtgggcgcacgcgttgaccgccagccttacccgctgtcgcagccgcttaccagcggtcaaaccgttgaaatcattaccgctccgggcgctcgcccgaatgccgcttggctgaactttgtcgttagctcgaaagcgcgcgccaaaattcgtcagttgctgaaaaacctcaagcgtgatgattctgtaagcctgggccgtcgtctgctcaaccatgctttgggtggtagccgtaagctgaatgaaatcccgcaggaaaatattcagcgcgagctggatcgcatgaagctggcaacgcttgacgatctgctggcagaaatcggacttggtaacgcaatgagcgtggtggtcgcgaaaaatctgcaacatggggacgcctccattccaccggcaacccaaagccacggacatctgcccattaaaggtgccgatggcgtgctgatcacctttgcgaaatgctgccgccctattcctggcgacccgattatcgcccacgtcagccccggtaaaggtctggtgatccaccatgaatcctgccgtaatatccgtggctaccagaaagagccagagaagtttatggctgtggaatgggataaagagacggcgcaggagttcatcaccgaaatcaaggtggagatgttcaatcatcagggtgcgctggcaaacctgacggcggcaattaacaccacgacttcgaatattcaaagtttgaatacggaagagaaagatggtcgcgtctacagcgcctttattcgtctgaccgctcgtgaccgtgtgcatctggcgaatatcatgcgcaaaatccgcgtgatgccagacgtgattaaagtcacccgaaaccgaaattaa

SEQ ID NO: 199 - DNA, 690 bp, Escherichia coli
  CDS (1)...(690)
atgaacccaacacgttatgcacgcatctgcgaaatgctcgccaggcggcagcctgatctgaccgtctgcatggagcaggtccacaaacctcataacgtttctgcgattattcgtaccgcagatgccgttggcgtacatgaagttcacgccgtctggcctggtagccgcatgcgcaccatggcttcggcagcggcgggtagtaacagctgggtacaggtgaaaacacaccgcaccattggcgatgccgtcgctcatctcaaaggccagggcatgcagattctggcaacccatctttctgataacgctgtcgatttccgcgaaattgattacactcgcccgacctgcattttgatgggacaggagaaaacgggcatcacgcaggaagcattggccctggcggatcaggacatcatcattccgatgatcggcatggtgcagtcgctgaatgtttccgttgcctcagccctcattctttacgaagcccagcgtcagcggcaaaatgcaggcatgtacctgcgtgaaaacagcatgttgccggaagcagagcaacaacgcctgttgtttgaaggcggctatccggtgctggcgaaagtcgcaaaacgcaaaggcctgccttatccccacgtcaatcagcaaggcgagatcgaagctgatgccgactggtgggctactatgcaggctgcagggtaa

SEQ ID NO: 200 - DNA, 2082 bp, Escherichia coli
  CDS (1)...(2082)
atgaaaggtcgcctgttagatgctgtcccactcagttccctaacgggcgttggcgcagcacttagtaacaaactggcgaaaatcaacctgcataccgtgcaggatctactcttacaccttcccctgcgctacgaagatcgcacccatctctaccccatcggagaactactgccgggcgtttatgccacggtggaaggcgaagtgctgaactgcaatatctccttcggcggtcggcggatgatgacctgccagatcagcgacggttccggcatcctcaccatgcgctttttcaatttcagcgcggcaatgaaaaatagcctggcggcgggccgccgtgtactggcttatggcgaagcaaagcgcggtaaatatggtgcggagatgatccacccggaataccgcgtgcagggcgatctcagcacgccagaattacaggaaacgctcacgccggtttatccaacaacggaaggcgtaaagcaggccacgctgcgtaaattaaccgaccaggcgctggatctgctcgacacctgcgccattgaagaactcctgccgccggaactgtcacaaggaatgatgacgctaccggaagcgttgcgcactttgcaccgcccgccaccgacgctacagcttagcgatctggaaaccgggcagcatccggcgcaacgtcgtctgattctggaagaactgctggcgcacaacctcagcatgttagccttacgtgccggagcacagcgttttcatgcccagccgctgagcgccaatgacacgctgaaaaataaactcctcgccgccttaccgttcaagccaacgggcgcacaggcacgcgtagtggcggagatcgagcgcgatatggcgctggatgtgccgatgatgcgtctggtgcagggcgatgtaggttccggtaaaacgctggtcgccgccctcgccgcgttgcgtgcgattgcccacggcaaacaggtagcattgatggcaccaaccgaattactcgccgagcagcacgccaataacttccgcaactggtttgcaccgctcggtatcgaagtgggctggctcgccggtaagcagaaaggtaaagcacggctggcacagcaggaagccatcgccagcggtcaggtgcagatgattgtcggtacacacgccatcttccaggaacaggtgcagtttaacggcctggcgctggtgattatcgacgaacagcatcgttttggcgtgcatcagcgtctggcattgtgggagaaaggccagcagcagggcttccatccgcatcagttgatcatgaccgccacgccgatcccccgcacgctggcaatgactgcgtatgccgatctcgatacctcggtgatagatgagctgccgccaggccgcacgccagtgactacggtcgctattcctgatacccgccgtaccgacatcattgaccgcgtgcaccacgcctgcataactgaaggtcgtcaggcatactgggtttgtacgttgattgaagagtcggaattgctggaagcgcaggcggcggaagctacctgggaagagttgaaactggcgctaccagagttgaacgttggcctggtacacgggcggatgaaacctgccgagaaacaggcggtgatggcgtcgtttaaacaaggtgagctacacctgctggttgccacaaccgttattgaagtcggcgttgatgtgcctaacgccagtctgatgattatcgaaaacccggagcgtctgggtctggcgcagttacaccagctgcgcgggcgcgtaggtcgtggcgcggtggcttctcactgcgtgctgctctacaaaacgccgctttctaaaacggcgcaaattcgcctgcaagtgctgcgcgacagtaacgacggttttgtgattgcgcaaaaagatctggagattcgcggccctggcgaattgttaggcacgcgtcagacgggtaatgctgaatttaaagtggcggatttactgcgcgatcaggcgatgatcccggaagttcagcgcctggcacgccatattcacgaacgttacccacaacaggcaaaagccctgatagaacgctggatgccggagacggaacgttactcgaatgcgtaa

SEQ ID NO: 201 - DNA, 1287 bp, Escherichia coli
  CDS (1)...(1287)
atgaaaacctctctgtttaaaagcctttactttcaggtcctgacagcgatagccattggtattctccttggccatttctatcctgaaataggcgagcaaatgaaaccgcttggcgacggcttcgttaagctcattaagatgatcatcgctcctgtcatcttttgtaccgtcgtaacgggcattgcgggcatggaaagcatgaaggcggtcggtcgtaccggcgcagtcgcactgctttactttgaaattgtcagtaccatcgcgctgattattggtcttatcatcgttaacgtcgtgcagcctggtgccggaatgaacgtcgatccggcaacgcttgatgcgaaagcggtagcggtttacgccgatcaggcgaaagaccagggcattgtcgccttcattatggatgtcatcccggcgagcgtcattggcgcatttgccagcggtaacattctgcaggtgctgctgtttgccgtactgtttggttttgcgctccaccgtctgggcagcaaaggccaactgatttttaacgtcatcgaaagtttctcgcaggtcatcttcggcatcatcaatatgatcatgcgtctggcacctattggtgcgttcggggcaatggcgtttaccatcggtaaatacggcgtcggcacactggtgcaactggggcagctgattatctgtttctacattacctgtatcctgtttgtggtgctggtattgggttcaatcgctaaagcgactggtttcagtatcttcaaatttatccgctacatccgtgaagaactgctgattgtactggggacttcatcttccgagtcggcgctgccgcgtatgctcgacaagatggagaaactcggctgccgtaaatcggtggtggggctggtcatcccgacaggctactcgtttaaccttgatggcacatcgatatacctgacaatggcggcggtgtttatcgcccaggccactaacagtcagatggatatcgtccaccaaatcacgctgttaatcgtgttgctgctttcttctaaaggggcggcaggggtaacgggtagtggctttatcgtgctggcggcgacgctctctgcggtgggccatttgccggtagcgggtctggcgctgatcctcggtatcgaccgctttatgtcagaagctcgtgcgctgactaacctggtcggtaacggcgtagcgaccattgtcgttgctaagtgggtgaaagaactggaccacaaaaaactggacgatgtgctgaataatcgtgcgccggatggcaaaacgcacgaattatcctcttaa

SEQ ID NO: 202 - DNA, 1191 bp, Escherichia coli
  CDS (1)...(1191)
gtgaccacccgacagcattcgtcgtttgctattgtttttatccttggcctgctggccatgttgatgccgctgtcgattgatatgtatctgcccgcgctaccggtaatttcagcgcagtttggcgtaccggcgggcagtacgcagatgaccctcagtacttatattctgggctttgcgttggggcagttaatctacgggccgatggcagacagcttcgggcgtaagccggtggtgctcggcggtacgctggtgtttgccgccgccgcggtggcgtgtgcgttggcaaacaccatcgatcagctgattgtgatgcgtttcttccacgggctggctgcggctgcggccagcgtggtcattaacgccctgatgcgcgatatttacccgaaagaagagttctcgcggatgatgtcgtttgtcatgctggtgacaaccattgcaccgctgatggcaccgatagttggcggctgggtgctggtgtggctgagctggcattacatcttctggatcctggcattagcggcgattctggcttcggcaatgattttcttcctgattaaagaaaccttaccaccggagcgtcgtcagccatttcacattcgtaccactattggtaactttgcggcgctgttccgccataaacgtgtcctgagctacatgcttgccagtggtttcagctttgccgggatgttctcattcttaagcgccggaccgtttgtttatattgaaattaaccacgtcgcgccggaaaactttggttattactttgcgctaaacattgtttttctgttcgtgatgaccatctttaacagccgcttcgtccgccgcattggcgcgttaaatatgttccgctcggggttgtggatacaatttattatggcagcgtggatggtcatcagtgcgctgctggggctgggattttggtcgctggtggttggcgttgcggcgtttgtgggctgcgtgtcgatggtgtcatccaatgcgatggcggtcattcttgatgagtttccccatatggcgggaacggcatcttcgctggcaggaaccttccgttttggcataggggcaattgttggcgcattgctttctcttgcgacctttaactctgcatggccgatgatttggtcaattgcattctgcgcaaccagctccattctcttctgtctgtacgccagtcggccgaaaaaacggtga

SEQ ID NO: 203 - DNA, 696 bp, Escherichia coli
  CDS (1)...(696)
atgcgacttgataaatttatcgcacagcaactcggcgttagccgtgctattgccgggcgtgaaatccgcggcaatcgtgtcaccgtcgatggcgaaatcgtccgtaatgcagcgttcaaactgcttcctgaacatgatgtcgcttacgatggcaacccgctggcgcagcaacacggtccacgttacttcatgctcaataagcctcagggctatgtttgctccacggacgaccctgatcacccaacggtgctctattttcttgatgaaccggtagcgtggaaactgcatgcggcggggcggttggatattgataccaccggtctggtgctgatgactgatgatggtcagtggtcgcaccgcattacttctccgcgccatcattgcgagaagacctatctggtgacactggaatcacctgtagctgacgatacggcagagcaatttgctaaaggcgtgcagctgcataacgaaaaagatctcactaagcctgcggtgctggaagtgattaccccaacgcaggttcgtctgaccatcagcgaagggcgttatcatcaggtgaaacgcatgttcgccgccgtgggtaaccacgtggttgagctgcatcgtgaacgtattggcggtattacgctggatgctgatttagcccccggtgaatatcgtccgttaactgaagaagaaattgccagcgtcgtctaa

SEQ ID NO: 204 - DNA, 1329 bp, Escherichia coli
  CDS (1)...(1329)
atgaaaaaaattgaatgcgcttgcaattttctgatggataaagatgcgcaggggtatatcgacctgtctgatttggatttaacaagttgtcattttaaaggtgacgttatatcgaaggtgtcttttttatcatcaaatctacaacatgtaacattcgaatgtaaagaaattggggattgcaattttactactgcaatagttgataatgtcatatttagatgtcgacgtttacacaatgtgatttttatcaaagcgagtggtgaatgtgtcgatttcagcaaaaatattcttgatacagttgacttctcgcagagtcaacttggtcatagtaattttcgcgaatgtcagattagaaattcaaacttcgataattgttatctttacgcttcgcacttcaccagagcagagtttctgtctgccaaagaaatatcatttattaaatcgaatttgacagctgttatgtttgattatgtgcgaatgtcgacagggaattttaaagattgcattacagaacaattggaattaactattgattattcagatatattttggaatgaagatctcgatggttatatcaataacattataaaaatgattgatacattgccagataatgcaatgatattgaaatccgttctggccgtaaaactggtgatgcaattaaaaatacttaatattgttaataaaaactttattgagaatatgaagaaaatatttagccattgtccttatataaaagatcccattatacgcagttatatccattctgatgaagataacaagttcgatgattttatgcgtcaacatcgattcagtgaggtgaatttcgatacccaacagatgatcgattttattaacagatttaatacgaataaatggctaattgataaaaataacaatttttttatccaacttatcgatcaggccttacgatcaacggatgatatgatcaaagcaaatgtttggcatctttataaagagtggattcgtagtgatgatgtttcacctatatttatagaaactgaagataatttaagaacctttaacacgaatgaattaacacgaaacgataatatctttatcctgttctcctcagtcgatgatgggccagttatggtggtaagctcccagcgcttacatgatatgttgaatcctacaaaagataccaattggaattccacgtatatctacaaatccagacatgagatgttgcctgttaatcttactcaggaaacacttttcagctccaaatctcatggtaaatatgcgcttttccccatttttactgcgagttggcgagctcatcgtataatgaataagggtgtttaa

SEQ ID NO: 205 - DNA, 717 bp, Escherichia coli
  CDS (1)...(717)
gtgggacgtaaatgggccaatattgttgctaaaaaaacggctaaagacggtgcaacgtctaaaatttatgcaaaattcggtgtagaaatctatgctgctgctaaacaaggtgaacccgatccagaattaaacacatctttaaaattcgttattgaacgtgcaaagcaggcacaagttccaaagcacgttattgataaagcaattgataaagccaaaggcggcggagatgaaacgttcgtgcagggacgttatgaaggctttggtcctaatggctcaatgattatcgccgagacattgacttcaaatgttaaccgtacgattgctaacgttcgcacaattttcaataaaaaaggcggcaatatcggagcggcaggttctgtcagctatatgtttgacaatacgggtgtgattgtatttaaagggacagaccctgaccatatttttgaaattttacttgaagctgaagttgatgttcgtgatgtgactgaagaagaaggtaacattgttatttatactgaacctactgaccttcataaaggaatcgcggctctaaaagcagctggaatcactgagttctcaacaacagaattagaaatgattgctcaatctgaagttgagctttccccagaagatttagaaatctttgaagggcttgttgatgcccttgaagatgacgacgatgtacaaaaagtttatcataacgtcgcaaatctctaa

SEQ ID NO: 206 - DNA, 786 bp, Escherichia coli
  CDS (1)...(786)
gtggttcttatgtccgaaacaaaaaacgaacttgaagacctgctggaaaaagcagcaactgaaccggcgcaccgcccggcctttttccgtactctactggaatccaccgtctgggtgcctggtacggcggcgcagggcgaggctgtggttgaagatagcgcgcttgatttacagcactgggaaaaagaagacggcaccagcgtcattccttttttcacctcgttagaagcacttcaacaggcggttgaagacgaacaggcatttgtcgtaatgcccgttcgcacgctgtttgagatgacacttggcgaaacgctcttccttaatgccaaactgccaaccggtaaagaatttatgccgcgtgaaatcagtttgttgattggtgaagagggaaatccgctgagcagccaggaaatcctggaaggcggtgaatcgctgatattatcggaagtcgcagagccgccagcacaaatgattgattcactcaccaccttatttaaaaccattaagccggtgaagcgtgcttttatttgttcaattaaagagaacgaagaggcacagcctaatttacttattggcattgaagccgatggtgatatcgaagaaattattcaggcgacgggaagtgtagcgaccgatacattacctggcgatgaaccaatcgatatttgtcaggtgaaaaaaggggaaaaaggaattagccactttattaccgaacatattgcgccattctatgaacgtcgctggggtggttttttgcgtgactttaaacagaatcggataatctaa

SEQ ID NO: 207 - DNA, 1266 bp, Escherichia coli
  CDS (1)...(1266)
atgctcacgaaaaagaaatgggcgttatttagtctattaacactgtgtggcggtacaatttataaattaccgtcgctgaaagatgcgttttatatcccgatgcaggaatatttccatttgaccaatggtcaaattggtaatgctatgtcggtaaactcatttgtcaccacagtgggcttttttctgtctatttattttgccgataaactaccgcgcagatacaccatgtcattctcactcattgcgacaggattactgggtgtttatttgacgacaatgccggggtattggggcatcctctttgtctgggcgctatttggcgttacttgcgacatgatgaactggccggtcttgctcaagtcggtaagtcgattgggcaatagcgaacaacaaggtcggttgtttggcttcttcgaaacagggcgtggcattgtcgataccgtggtggcattttctgcgttggcagtatttacctggtttggcagtggcttattaggttttaaagcaggcatctggttctattcccttattgtgattgccgtaggcattattattttctttgtcctgaatgacaaagaagaggcaccgtccgttgaggtgaaaaaagaagacggagcatcgaaaaacaccagtatgacctcggtgctgaaagacaaaactatctggcttatcgcttttaacgtcttcttcgtttacgcggtttactgtggcctgacattcttcattccattcctgaaaaacatctatctattgcccgttgcgctggtgggggcttacggcatcattaaccaatactgtctgaaaatgattggtggaccgattggtggcatgatttcagataagatcctgaaatcgccaagtaaatatctatgctacacctttatcattagtaccgctgcgctcgtactgttgattatgctgccgcacgaaagtatgccggtctatttagggatggcatgtacgctgggctttggcgcgatagtctttacacagcgagccgtattttttgcacctatcggcgaagcaaaaattgctgaaaataaaacaggtgcggcgatggcgttgggtagctttattggttacgctccggcgatgttctgcttcagtctgtatggctacattctggatttaaatccggggattattggctacaaaatcgtgtttggcattatggcctgcttcgcattcagtggtgcggtggtttccgtaatgctggttaagcgtattagccaacgtaagaaagagatgctggcggctgaagcttaa

SEQ ID NO: 208 - DNA, 2313 bp, Escherichia coli
  CDS (1)...(2313)
atgcctcgcttgttaaccaaacgcggctgctggataacgttggcagccgcgccctttctcctttttcttgcagcgtggggagcagataaactctggcctctaccgctgcatgaagtcaatcccgcacgagtggtcgtggcgcaggatggtacgccgctctggcgcttcgccgatgctgacggcatctggcgttatccggtaacaatcgaagatgtttctccacgttaccttgaagcgctgatcaattatgaagatcgctggttctggaagcatccgggggtgaatccattctcggtggcgcgcgcagcatggcaagatctcacttcgggacgggttatttccggtggcagcacgctcactatgcaggttgctcgtctgcttgatcctcaccccaaaacatttggcggcaaaattcgccagctctggcgcgcgttgcaactggaatggcatctgtctaagcgtgaaattctgaccttgtatcttaaccgcgctccgtttggcggtacgttgcaggggatcggtgcggcaagttgggcttatctcggaaaatcgcctgcgaatttaagctattccgaggcggcaatgctggcggttttgccgcaagcgcccagccgtcttcgcccggatcgttggccggagcgtgccgaagccgcgcgtaataaagtgctcgaacggatggccgtgcaaggtgtgtggtcccgtgagcaggtaaaagagtcaagggaagaacccatctggctggccccccgacaaatgccgcaactggcaccgctgttttcgcgcatgatgctcggtaaaagcaaaagcgacaaaatcactactacgttggatgccggtcttcaacgacgtctggaagaactggcgcaaaactggaaagggcggttgccaccgcgcagctcactggcgatgatcgtggttgatcataccgatatgcgtgttcgcggctgggtgggatcggttgatctcaacgatgattcacgctttggtcatgttgatatggtcaattcgatccgatcgccaggatcagtgctcaaaccgtttgtttatggtctggcgctggatgaaggcttgatccacccggcatcactgctgcaagacgtcccccggcgcaccggtgattatcgaccaggtaactttgatagcggttttcatggcccgatcagcatgagcgaggcgctggtgcgctcgctgaacttacctgctgtgcaggtgctggaagcctatggaccgaaacggtttgcggcaaagttacgcaatgttggattgccgttatatttgcccaacggtgctgcgccgaatctttcactcattctcggcggcgctggtgcaaaactggaagatatggcggcagcgtataccgcgtttgctcgccacggcaaggcaggcaaattgcgcttacagcctgacgatccgctgcttgaacggcctttaatgtcgtcgggggcggcgtggatcattcgccggattatggctgatgaagcgcaacccttgccggatagtgccttgccgcgcgtcgccccactggcatggaaaacgggcaccagctatggctatcgtgacgcctgggcgattggggttaacgctcgctatgtcattgggatctggactggcagaccggacggcacgcccgttgttggtcagtttggctttgccagtgccgtaccattgttgaatcaggtcaataatatcttactgtcgcgcagtgcgaatctgccggaagacccgcgcccgaactcagtcactcgtggcgttatctgctggccgggcggacagtctttgccggaaggtgacggtaactgtcgccgccgcctggcaacctggctgctggacgggagtcagccgccaactctattactgccggagcaggaaggcattaatggcattcgtttccccatctggctggatgaaaatggcaaacgtgttgccgctgattgcccgcaagcgcgacaagaaatgataaatgtctggccgctaccgctggaaccctggctgcccgcatcagaacgtcgcgctgtgcgcttaccaccggcctcgacaagttgcccgccatacggtcacgatgcccagctcccgctgcagctgacaggcgttcgcgatggcgcgattattaaacgtttaccgggcgcagcggaagcgactttgccgttgcaatcaagtggaggggcaggtgaacgctggtggtttctgaatggcgaaccgttaactgaacgcgggcgcaacgtgaccctgcatttgacggataaaggtgattatcaattgctggtgatggatgacgtggggcaaatcgcgacagtgaaatttgtcatgcaatag

SEQ ID NO: 209 - DNA, 4962 bp, Escherichia coli
  CDS (1)...(4962)
atgaaaaagttacgcgtagccgcctgcatgctaatgctggcgctggcagggtgcgacaacaacgataacgcgccaacagcggtgaaaaaagatgcgccttctgaagttactaaagcggcctcttcagaaaacgcgagttcagcaaaactctccgtgccggagagacaaaaactggcccaacagagtgccggtaaggtgctgacattgctggatctctctgaagtccaacttgatggtgcagccacgctggtgctgacgttctccatccctctcgacccggatcaggatttctcacgcgttattcatgtcgtcgataaaaaaagcggcaaagtggatggtgcctgggagctgtcagataatcttaaagagttacgtttacgccacctcgaaccgaaacgtgatttgatcgttactattggcaaggaggtcaaagcactcaacaacgcaaccttcagtaaagattacgaaaaaactataactacccgcgacatccaacccagcgtcggttttgccagccgtggttcgctgctgcctggcaaagtcgttgaagggctgccggtaatggcgctcaacgttaataatgtcgatgttaacttcttccgcgttaagccagaatctctgccagcattcattagccaatgggaataccgcaattcgctggcgaactggcagtcagacaaactgctgcagatggcggatctggtctacaccggacggtttgatctcaatcctgcgcgtaacacccgtgaaaaattattgctgccgctgggcgatatcaaaccgcttcagcaggcgggcgtgtatctggctgtgatgaatcaggctggacgttacgattacagtaatcccgcgacgctgtttacgttaagtgatatcggcgtttcagctcaccgttatcacaatcgtctggatatctttacccaaagtctggaaaacggcgcggcccagcaaggaattgaagtctctttattaaatgagaaagggcagactctgactcaggcaaccagtgacgctcaggggcatgtgcagctggaaaatgataaaaacgcggcattactgttggcgcgtaaagacggtcagacaacgctactcgatttaaaacttccggcgctggacttagcagaatttaacattgctggcgcgccaggctatagcaaacagtttttcatgtttggcccacgcgatctttatcgcccaggtgaaacggtaatcctcaatggtttgctgcgtgatgcagacggtaaagcgttgcccaatcaacccatcaagttagacgtgattaaacccgatgggcaggtactcaggagcgtcgttagtcagccggagaatggcctctaccactttacctggccactcgatagcaatgcggcaaccggtatgtggcatattcgcgctaacacgggcgataatcagtatcggatgtgggatttccacgtcgaagattttatgccagagcgcatggcgctgaatctgaccggtgagaaaaccccgctaacgccgaaagatgaagtgaaattctccgtggtggggtactacctgtatggtgcacctgctaatggtaatactttgcaagggcaacttttcctgcgcccactgcgtgaagctgtgtcagccttacctggttttgaattcggcgatatagctgccgaaaatctttcccgcacgctggatgaagttcagttgacgctggatgataaagggcgcggcgaagtttctacagaaagccagtggaaggaaacgcattccccattacaggttattttccagggtagtttgctggaatcgggcggtcgcccggtgacgcgccgcgctgagcaggctatctggcctgccgatgcattgccggggatccgtccgcagttcgcctcgaaatcggtttacgattatcgtactgacagcacggtgaaacagcccattgttgatgaaggcagtaacgccgcttttgacatcgtttatagcgatgcgcaaggcgtgaaaaaagccgtgtcgggcttgcaggtgcgcctgattcgcgaacgccgcgattactactggaactggtcagaagatgaaggctggcagtcacagtttgatcaaaaagatctgatcgaaaatgaacaaactctggatctgaaagcggacgaaaccggcaaggtcagttttccggtagagtggggcgcttatcgtctggaagtcaaagcgccgaatgaagcggtcagtagtgttcgtttctgggctggctatagctggcaggacaacagcgacggtagcggcgcagtgcgacccgaccgtgtcacgctgaaactggataaagccagttatcgccctggcgacaccattaagttgcatatcgccgcgccaacggcgggtaaaggttatgcgatggtcgagtccagtgaagggccgctgtggtggcaagagattgatgttcgggctcaagggctggatctgacgattccggtcgataaaacctggaatcgtcatgatctgtatttaagtacgctggtggtacgtcctggcgataaatctcgctccgcgacgccaaaacgcgcggttggtgtgttgcatctgccgcttggcgatgaaaaccgtcgcctcgatctggcgctggaaacaccagcaaaaatgcgtcccaatcaaccattaaccgtgaaaattaaagccagcactaaaaatggcgagaagcctaaacaggtgaatgtgctggtgtctgccgttgatagtggtgtgctgaatattactgactacgtcacgccagatccgtggcaggcgttctttggtcagaaacgctatggcgcagacatttacgatatttacggtcaggttattgaaggtcaggggcgtctggcagctctgcgtttcggtggcgatggtgatgagctgaaacgtggtggtaaaccgccggtcaatcacgtcaatattgtcgtgcagcaggcgctgccggtaacgctcaacgaacagggcgaaggctcggttacactgccgattggcgattttaacggtgaattgcgcgtcatggcgcaagcctggacggcagatgacttcggtagcaacgaaagtaaagtgatagttgccgcaccggtgattgctgaactgaacatgccgcgctttatggcgagtggcgatacctcgcgtctgacgctggatatcactaatcttaccgataaaccgcaaaaactgaacgttgccctgaccgccagtggtttgcttgaactggtcagcgattcacccgcagccgttgaattagcgccaggtgtgcgtactacgctgtttatcccggtgcgagcattgccgggttatggcgatggagaaattcaggccaccattagcgggttagcgttaccgggtgaaaccgttgccgatcagcataagcagtggaaaatcggcgtccgtccggcgttcccggcacaaacggttaattacggtacggcgttacagcctggtgagacatgggcgattccggcggatggattgcaaaacttctcgcctgttacgctggaagggcaattgttgttgagcggcaaaccaccgctgaacatcgcacgttatatcaaagagttaaaagcgtatccgtacggctgtcttgagcaaaccgccagcggcctgtttccgtcactttataccaacgcagcccaactgcaggcgttgggcatcaaaggcgacagtgatgagaaacgccgtgcatcggtcgatatcggcatttcccgtttgctgcaaatgcaacgtgataacggcggctttgcgctgtgggataaaaacggtgacgaagagtactggctgacggcttacgtgatggatttcctggtccgcgcaggcgaacagggttacagcgtgccgacagacgccattaaccggggtaatgagcgtctgctgcgctatttacaagatccgggcatgatgtcgatcccgtacgcggataatctcaaagccagtaaattcgccgtacagtcttacgctgcgctggtgttggcccgtcagcaaaaggctccgctgggtgcgctgcgtgaaatctgggagcatcgtgcagatgccgcttctggtttaccgctgctgcaacttggcgttgcgctgaaaaccatgggtgatgcgacgcgtggtgaagaagcgattgcgctggcgctgaaaacgccgcgtaatagtgatgagcggatatggctgggtgattacggtagttcactgcgcgacaacgcgttaatgctctccttgctggaagaaaataaactgctacccgatgagcagtacactttgctgaacacactttcgcagcaggcgtttggtgaacgctggctatcgacgcaggaaagtaacgcgttgttcctggctgcccgtacgattcaggatttacccggtaaatggcaggcgcaaacctctttctcagctgagcagctgacaggcgagaaagcgcaaaacagcaatctgaatagcgatcaacttgtcaccttgcaggtgagcaacagtggcgatcagccgttatggttgcgtatggatgccagcggttatccgcaatccgcacctttaccggcgaacaatgtgctgcaaatcgagcgtcatattcttggtactgatggtaagagcaaatcgctggactcgttacgtagcggcgatctggtgctggtgtggttgcaggtaaaagccagtaacagcgtgccggatgcgttagtcgtggatctgctgcctgcgggtctggaactggaaaaccagaatctggcgaacggtagcgccagcctggagcaaagtggtggcgaagtgcagaacttactgaaccagatgcagcaggcgagcattaagcacattgagttccgtgacgatcgctttgtggcggcggttgccgttgatgaataccaaccggtaacgctggtgtatctggcgcgggcggtgacgccgggaacgtatcaggtaccgcaaccgatggtggaatcaatgtatgttccccaatggcgggcgaccggcgcggctgaagatctgctgattgtcagaccgtaa

SEQ ID NO: 210 - DNA, 795 bp, Escherichia coli
  CDS (1)...(795)
atggatctgttgtaccgggtaaaaacgctttgggccgcgctgcgcggtaatcattacacctggcctgccatcgatatcaccctccccggcaatcgccattttcatctgattggcagtattcatatgggtagccacgatatggctcccctgcccacccgtttgctcaaaaagctcaaaaacgccgatgcgctgatcgtcgaggcggatgtttccaccagcgatacgccttttgctaatttgcctgcctgcgaggcgctggaagagcgcattagcgaggagcaactccaaaacctgcagcacattagccaggagatgggcatttctccctcactcttttctacccaaccgctgtggcaaatcgcgatggttcttcaggcgacgcaggcacaaaaactggggctgcgggcagaatacggtatcgattaccagctattgcaggcggcgaagcaacaacataaacccgtgattgaactggaaggggctgaaaaccagattgccatgttgctccagctccctgacaaaggactggcgctgctggacgatacgctgacccactggcataccaacgcacggttgctgcaacaaatgatgagctggtggctgaatgcaccgccgcaaaataatgatataacgctgcccaatacgttcagtcagtcgctgtacgatgtgctgatgcatcagcgaaatctcgcctggcgggataaattacgcgccatgccgccggggcgatatgtggtcgcggtcggtgcactacacctgtatggagaagggaatttgccgcaaatgttgcgctaa

SEQ ID NO: 211 - DNA, 969 bp, Escherichia coli
  CDS (1)...(969)
atggataattttcttgctctgaccttaacgggtaaaaaaccggttatcaccgagcgagaaatcaacggcgttcgctggcgctggctgggcgatggtgtgctggaactgacgccattaacgccaccgcaaggcgcactggtgatttcagcgggaatacacggtaatgagacggcacctgtggagatgctggacgcgttgcttggcgcgatatctcacggcgagatcccgttacgttggcggttgctggtgatcctcgggaatcctcctgcgctgaagcaagggaaacgttattgccatagcgatatgaatcgaatgtttggcggtcgttggcagctatttgctgaaagcggagaaacctgtcgggcgcgcgaactggaacagtgcctggaagatttttatgaccagggcaaagaatctgtgcgctggcaccttgatctacataccgcaattcgtggctccttgcatccgcagttcggtgtattaccgcaacgcgacattccctgggacgagaaatttctgacgtggctgggtgcggcggggctggaggcgctggtgttccatcaggaacctggtggtacgtttacccatttcagcgccagacattttggcgcgctggcctgtacgctggaacttggcaaagcgttgccctttgggcaaaacgatcttcgccagtttgcagtaactgccagcgcaattgctgcgctgctatctggtgagagtgtcggtatcgtgagaacaccgccgctccgttatcgggtggtttcgcaaattactcgccactcgccgtccttcgaaatgcatatggcaagtgacacgctgaattttatgccgtttgagaaaggaacattgctggcgcaggacggagaggaacgttttaccgtaacccatgatgtagagtatgtgttattccctaatccgttggtagcgttgggattacgcgcgggattaatgctcgaaaaaataagctaa

SEQ ID NO: 212 - DNA, 1344 bp, Escherichia coli
  CDS (1)...(1344)
atgaacgcctgggaagtcaatttcgacgggctggtagggctgacgcatcattacgcgggcctgtcgtttggtaatgaagcctctacccgtcaccgttttcaggtgtctaacccgcgactggcggcgaagcagggcttactgaaaatgaaagcccttgccgatgcgggattcccccaggccgtgatcccgccgcacgagcgtccgtttattccggtgctgcgtcagttgggattcagtggtagcgatgagcaggtactggaaaaagttgcacgccaggcaccgcactggctttccagcgtcagttccgcttcgccaatgtgggtagccaatgcggcaacgatcgcgccatctgccgatacgctggatggcaaagtgcatctcaccgttgccaacctgaacaataaatttcaccgttcgctggaagcgcccgtcactgaatcgctgttaaaagcgatttttaacgacgaagagaaatttagcgtccattcggcgttgccacaggtagcgttgctcggtgatgagggggcggcaaaccacaatcgtctcggcggtcattacggtgaaccgggtatgcaactttttgtctacgggcgagaagaaggcaatgatacccggccttcccgttatccggcgcgacagactcgcgaagccagcgaggcggtggcaaggctgaatcaggtgaatccccaacaggtgattttcgcccagcaaaacccggacgttatcgaccagggcgtttttcataatgacgtgattgccgtgagtaaccgccaggtgctgttttgccaccaacaggcgttcgctcgccagtcacagttactggcaaacctgcgtgcgcgggtcaatggttttatggcgatagaagttccggcaactcaggtttccgtgtctgatacggtgtctacctatctgtttaacagccaactgctgagccgcgatgatggttccatgatgttggtgctgcctcaggagtgtcgggaacacgccggagtatggggttatctcaatgaactccttgccgctgacaacccgattagcgaactaaaagtctttgatttacgtgaaagcatggcgaatggcggcggcccggcgtgcctgcggttgcgggtggtattgacagaagaagaacgccgggcggtgaatccggcggtgatgatgaacgatacgctgtttaatgcgctcaatgactgggtggatcgttactaccgcgatcgccttactgctgccgatctggccgacccgcaattgctgcgcgaagggcgggaagcactggatgtattgagccaattactgaatctcggttcggtttatccgttccagcgcgagggagggggcaatggataa

SEQ ID NO: 213 - DNA, 1479 bp, Escherichia coli
  CDS (1)...(1479)
atgactttatggattaacggtgactggataacgggccagggcgcatcgcgtgtgaagcgtaatccggtatcgggcgaggtgttatggcaaggcaatgatgccgatgccgctcaggtcgagcaggcttgtcgggcagcccgtgcggcgtttccgcgctgggcgcggctttcatttgctgaacgtcatgccgttgtcgaacgctttgccgcactgctggaaagcaataaagccgaattaaccgcgattattgccagagaaacgggtaagccgcgctgggaagcggcaaccgaagtgacggcgatgatcaataaaatcgcgatatcaattaaggcgtatcacgttcgtaccggcgagcagcgtagtgaaatgccggacggcgcggcgagcctgcgacatcgcccgcacggcgtgctggcggtgtttgggccgtataatttccctggtcatttgccgaacggacatatcgttccggcattgctggcaggtaacaccattatctttaaacccagcgaactgacaccgtggagtggcgaagcggtaatgcgtttatggcagcaggctggcttgccgccaggcgtgctgaacctggtgcagggcgggcgtgaaacgggtcaggcgctgagtgcgctggaggatctcgacggtttgctgtttaccggtagcgccaatacaggctaccagttgcatcgccagctctccggtcagccggagaaaattctcgcccttgagatgggcggtaataatccgctaattatcgatgaggtggcggatatcgacgcggctgtccatctgaccattcagtcggcgtttgtcacagccggtcaacgctgcacctgcgcccgccgtttattgctgaaaagcggggcgcagggcgatgcgtttcttgctcgtctggttgccgtcagccagcgattaacgccgggcaactgggatgacgaaccgcagccgtttattggcgggctgatttctgaacaggccgcacagcaggtggttactgcatggcagcaactggaagcgatgggcggacgacccctgcttgcgccgcgcttattacaagcagggacatcgttgctgacgccggggatcattgaaatgacaggcgttgctggcgtaccagatgaagaggtgttcggaccgttattgcgcgtctggcgttatgatactttcgatgaagcgattcgaatggcgaataacactcgcttcggactctcttgcggtctggtttcccccgagcgggaaaagttcgatcaactgttgctggaggcgcgggcggggattgttaactggaacaaaccgcttaccggtgctgccagtaccgcgccattcggcggcattggtgcttccggtaaccatcgccccagcgcctggtatgccgcagattactgcgcatggccgatggcgagcctggagtcggactcgttaacattgcccgccacgcttaaccccgggctggatttttccgatgaggtggtgcgatga

SEQ ID NO: 214 - DNA, 1035 bp, Escherichia coli
  CDS (1)...(1035)
atgatggtcatccgtcccgttgagcgatcagatgtctcggcgctgatgcagcttgccagcaaaacgggcggcggcctgacgtcgcttcccgccaatgaagccacgctttcggcgcgtatcgaaagggcaatcaaaacctggcaaggcgaactgcccaaaagtgagcagggctatgtgttcgtgctggaagatagcgagacaggcaccgtggcggggatttgtgccattgaggtggcggttgggctgaacgatccctggtacaactatcgcgtcggcacgttggttcacgcctcaaaagagctgaatgtctataacgcattgccgacgctgtttctcagtaacgatcacaccggcagcagcgagctgtgcacgctgtttctcgacccggactggcgcaaagagggcaacggctatttgctgtcgaaatcgcgctttatgtttatggcggcttttcgcgacaagtttaatgacaaagtggttgctgaaatgcgcggggtgattgacgaacacggctattcaccgttctggcaaagcctcggtaaacgcttcttttcgatggattttagccgcgccgattttctctgcggcaccgggcaaaaggcatttattgcagaactgatgccgaaacatccgatctatacccactttttatcccaggaagcccaggacgtcatcggtcaggtacatccgcaaaccgcgcctgcccgcgcggtgctggagaaagaaggttttcgctaccgtaactatatcgacatctttgacggtgggccgacgcttgagtgtgacatcgaccgcgtgcgcgccatccgtaaaagtcggctggtggaagtggcagaagggcagcctgcgcagggcgatttcccagcctgcctggtcgccaatgaaaattatcaccatttccgcgtggtgctggtgcgtaccgatccggcaaccgagcgtttgattttaaccgccgcacaactggatgccctcaaatgccacgccggggatcgcgttcgtctggtgcgcctgtgcgcagaggagaaaacagcatga

SEQ ID NO: 215 - DNA, 1221 bp, Escherichia coli
  CDS (1)...(1221)
atgtctcagccaattacgcgtgaaaactttgatgaatggatgatacctgtttacgctccggcaccctttataccggtacgtggcgaaggttcgcgcttgtgggatcagcaggggaaagagtatatcgacttcgcgggtggcattgcggtgaacgcgctgggccatgcgcatccggaactgcgtgaagcgctgaacgaacaggcgagtaagttctggcataccggcaacggttacaccaacgagccggtactgcgactggcgaaaaaattgatcgacgccacgtttgccgatcgcgtcttcttttgtaactccggtgcggaagccaacgaagcggcgctaaaactggcgcgtaaattcgctcacgaccgctacggcagccataagagcggcatcgtggcgttcaaaaatgcgtttcatggtcgcacgctgtttactgtcagtgcgggtgggcagccagcctattcacaggattttgcgccactgccggcggatattcgtcatgctgcatataacgatattaactctgccagcgcgctgattgacgactctacctgtgcggtgattgtcgaacccatccagggggaaggcggtgtggtgccagccagcaacgcgtttttacaaggtctgcgtgaattgtgtaaccgccacaatgcgctgttgatttttgatgaagtacaaaccggcgtcgggcgcaccggggaactgtatgcctatatgcactacggcgtgacgcctgatctgttaactaccgccaaagcgctgggcggcggtttcccggtcggtgcgttgttggcaaccgaagagtgcgcccgcgtgatgaccgttggcactcatggcaccacctatggcggtaatccgctggcctcggcggtggcaggcaaagtgctggagctcatcaacacaccagagatgcttaatggcgttaaacagcgtcacgactggtttgttgagcgtcttaatactattaatcaccgctatggtttgttcagtgaagttcgcggcttaggtttgctgattggctgtgtactgaatgccgattacgccgggcaagcgaaacagatctctcaggaagcggcgaaagcaggcgtgatggtactgattgcgggtggcaacgtggtgcgttttgcgcctgcgctcaatgtcagcgaagaagaggtgacgaccggactggatcgctttgcagctgcttgcgaacactttgttagccgaggttcatcatga

SEQ ID NO: 216 - DNA, 3147 bp, Escherichia coli
  CDS (1)...(3147)
atgaaaattctcagcctgcgcctgaaaaacctgaactcattaaaaggcgaatggaagattgatttcacccgcgagccgttcgccagcaacgggctgtttgctattaccggcccaacaggtgcggggaaaaccaccctgctggacgccatttgtctggcgctgtatcacgaaactccgcgtctctctaacgtttcacaatcgcaaaatgatctcatgacccgcgataccgccgaatgtctggcggaggtggagtttgaagtgaaaggtgaagcgtaccgtgcattctggagccagaatcgggcgcgtaaccaacccgacggtaatttgcaggtgccacgcgtagagctggcgcgctgcgccgacggcaaaattctcgccgacaaagtgaaagataagctggaactgacagcgacgttaaccgggctggattacgggcgcttcacccgttcgatgctgctttcgcaggggcaatttgctgccttcctgaatgccaaacccaaagaacgcgcggaattgctcgaggagttaaccggcactgaaatctacgggcaaatctcggcgatggtttttgagcagcacaaatcggcccgcacagagctggagaagctgcaagcgcaggccagcggcgtcacgttgctcacgccggaacaagtgcaatcgctgacagcgagtttgcaggtacttactgacgaagaaaaacagttaattaccgcgcagcagcaagaacaacaatcgctaaactggttaacgcgtcaggacgaattgcagcaagaagccagccgccgtcagcaggccttgcaacaggcgttagccgaagaagaaaaagcgcaacctcaactggcggcgcttagtctggcacaaccggcacgaaatcttcgtccacactgggaacgcatcgcagaacacagcgcggcgctggcgcatattcgccagcagattgaagaagtaaatactcgcttacagagcacaatggcgcttcgcgcgagcattcgccaccacgcggcgaagcagtcagcagaattacagcagcagcaacaaagcctgaatacctggttacaggaacacgaccgcttccgtcagtggaacaacgaaccggcgggttggcgtgcgcagttctcccaacaaaccagcgatcgcgagcatctgcggcaatggcagcaacagttaacccatgctgagcaaaaacttaatgcgcttgcggcgatcacgttgacgttaaccgccgatgaagttgctaccgccctggcgcaacatgctgagcaacgcccactgcgtcagcacctggtcgcgctgcatggacagattgttccccaacaaaaacgtctggcgcagttacaggtcgctatccagaatgtcacgcaagaacagacgcaacgtaacgccgcacttaacgaaatgcgccagcgttataaagaaaagacgcagcaacttgccgatgtgaaaaccatttgcgagcaggaagcgcgcatcaaaacgctggaagctcaacgtgcacagttacaggcgggtcagccttgcccactttgtggttccaccagccacccggcggtcgaggcgtatcaggcgctggagcctggcgttaatcagtctcgattactggcgctggaaaacgaagttaaaaagctcggtgaagaaggtgcgacgctacgtgggcaactggacgccataacaaagcagcttcagcgtgatgaaaacgaagcgcaaagcctccgacaagatgagcaagcacttactcaacaatggcaagccgtcacggccagcctcaatatcaccttgcagccactggacgatattcaaccgtggctggatgcacaagatgagcacgaacgccagctgcggttactcagccaacggcatgaattacaagggcagattgccgcgcataatcagcaaattatccagtatcaacagcaaattgaacaacgccagcaactacttttaacgacattgacgggttatgcactgacattgccacaggaagatgaagaagagagctggttggcgacacgtcagcaagaagcgcagagctggcagcaacgccagaacgaattaaccgcgctgcaaaaccgtattcagcagctgacgccgattctggaaacgttgccgcaaagtgatgaactcccgcactgcgaagaaactgtggtattggaaaactggcggcaggtacatgaacaatgtctcgcattacacagccagcagcagacgttacagcaacaggatgttctggcggcgcaaagtctgcaaaaagcccaggcgcagtttgacaccgcgctacaggccagcgtctttgacgatcagcaggcgttccttgcggcgctaatggatgaacaaacactaacgcagctggaacagctcaagcagaatctggaaaaccagcgccgtcaggcgcaaactctggtcactcagacagcagaaacgctggcacagcatcaacaacaccgacctgacgacgggttggctctcactgtgacggtggagcagattcagcaagagttagcgcaaactcaccaaaagttgcgtgaaaacaccacgagtcaaggcgagattcgccagcagctgaagcaggatgcagataaccgtcagcaacaacaaaccttaatgcagcaaattgctcaaatgacgcagcaggttgaggactggggatatctgaattcgctaataggttccaaagagggcgataaattccgcaagtttgcccaggggctgacgctggataatttagtccatctcgctaatcagcaacttacccggctgcacgggcgctatctgttacagcgcaaagccagcgaggcgctggaagtcgaggttgttgatacctggcaggcagatgcggtacgcgatacccgtaccctttccggcggcgaaagtttcctcgttagtctggcgctggcgctggcgctttcggatctggtcagccataaaacacgtattgactcgctgttccttgatgaaggttttggcacgctggatagcgaaacgctggataccgcccttgatgcgctggatgccctgaacgccagtggcaaaaccatcggtgtgattagccacgtagaagcgatgaaagagcgtattccggtgcagatcaaagtgaaaaagatcaacggcctgggctacagcaaactggaaagtacgtttgcagtgaaataa

SEQ ID NO: 217 - DNA, 1203 bp, Escherichia coli
  CDS (1)...(1203)
atgcgcatccttcacacctcagactggcatctcggccagaacttctacagtaaaagccgcgaagctgaacatcaggcttttcttgactggctgctggagacagcacaaacccatcaggtggatgcgattattgttgccggtgatgttttcgataccggctcgccgcccagttacgcccgcacgttatacaaccgttttgttgtcaatttacagcaaactggctgtcatctggtggtactggcaggaaaccatgactcggtcgccacgctgaatgaatcgcgcgatatcatggcgttcctcaatactaccgtggtcgccagcgccggacatgcgccgcaaatcttgcctcgtcgcgacgggacgccaggcgcagtgctgtgccccattccgtttttacgtccgcgtgacattattaccagccaggcggggcttaacggtattgaaaaacagcagcatttactggcagcgattaccgattattaccaacaacactatgccgatgcctgcaaactgcgcggcgatcagcctctgcccatcatcgccacgggacatttaacgaccgtgggggccagtaaaagtgacgccgtgcgtgacatttatattggcacgctggacgcgtttccggcacaaaactttccaccagccgactacatcgcgctcgggcatattcaccgcgcacagattattggcggcatggaacatgttcgctattgcggctcccccattccactgagttttgatgaatgcggtaagagtaaatatgtccatctggtgacattttcaaacggcaaattagagagcgtggaaaacctgaacgtaccggtaacgcaacccatggcagtgctgaaaggcgatctggcgtcgattaccgcacagctggaacagtggcgcgatgtatcgcaggagccacctgtctggctggatatcgaaatcactactgatgagtatctgcatgatattcagcgcaaaatccaggcattaaccgaatcattgcctgtcgaagtattgctggtacgtcggagtcgtgaacagcgcgagcgtgtgttagccagccaacagcgtgaaaccctcagcgaactcagcgtcgaagaggtgttcaatcgccgtctggcactggaagaactggatgaatcgcagcagcaacgtctgcagcatcttttcaccacgacgttgcataccctcgccggagaacacgaagcatga

SEQ ID NO: 218 - DNA, 765 bp, Escherichia coli
  CDS (1)...(765)
atgaacgatctattttcactggcaggaaaaaatatcttgattaccggttcagcacagggcattggctttttactggcaaccggcctgggtaaatatggcgcacaaataattattaatgatattactgccgaacgcgcagaacttgctgtagaaaaactccaccaggagggtattcaggccgttgccgcaccttttaatgttactcataaacatgaaattgatgccgccgttgaacatatcgaaaaggacatcggccccattgatgtgctggtgaataacgccggtatccagcgccgtcatccttttactgagttccctgaacaagagtggaatgatgtgatcgcagtaaaccagaccgccgtgttcctggtatcgcaagcggtaactcgtcacatggttgaacgcaaggcaggtaaagttattaatatttgctcgatgcaaagcgaactgggacgtgacaccatcaccccttatgccgcatcgaaaggggcggtaaaaatgctcacccgcggcatgtgcgtcgagctggcgcgccacaatattcaggtcaacggtattgcgccgggctatttcaaaacagaaatgactaaagcactggttgaggacgaagccttcaccgcctggttgtgcaaacggacccccgccgcacgctggggagatccgcaggaactgattggtgctgcggtgttcctttcttcaaaagcctctgatttcgtaaacggccacctgttgtttgttgatggcggcatgttagtggctgtttaa

SEQ ID NO: 219 - DNA, 1032 bp, Escherichia coli
  CDS (1)...(1032)
atgcaagtgaaaacacagtcctgcgttgttgcgggcaagaaaactgttgccgttaccgagcagacgatagattggaataataatggaacattagtacaaataacccgaggtggaatttgcggttccgatttacattattatcaggaaggaaaagtaggtaatttcatgataaaggcaccgatggtgttaggtcatgaagttatcggtaaagttattcatagcgactcatcagaattacatgaagggcaaacggtagccattaatccgtctaaaccgtgcggtcactgcaaatactgcattgaacataacgagaatcagtgtacagatatgcgtttttttggcagtgccatgtatttccctcatgttgatggtggttttacccgttataaaatggtcgaaacgtcgcaatgtgtcccttatccggccaaagctgacgaaaaggttatggcttttgccgaacctttagccgtcgcgattcatgccgcacatcaggccggcgagttacagggcaagcgagtatttatttccggtgttggacccattggctgcctgattgtcagtgcagtgaaaacactgggggccgcggaaattgtctgtgctgatgtgagtccccgttccctttcgctgggcaaagagatgggggcggatgtgctcgtaaacccacaaaacgacgacatggatcactggaaagcggaaaaaggctatttcgatgtcagctttgaagtgtccggtcatccttcatcagtgaatacctgtctggaggtcactcgtgcacgcggcgtaatggtgcaggtaggtatgggaggcgcgatggcagaattcccaatgatgacgttgattggtaaggagatttcactcagaggctctttccgttttaccagcgaatttaataccgcagtgtcatggctggcgaatggcgttatcaatccactgcctttactgagtgctgaatatcccttcactgacctggaagaggcgctacgtttcgccggtgataaaacccaggcagcaaaagtccagcttgttttctaa

SEQ ID NO: 220 - DNA, 1647 bp, Escherichia coli
  CDS (1)...(1647)
atggattcgcaacgcaatcttttagtcatcgctttgctgttcgtgtctttcatgatctggcaagcctgggagcaggataaaaacccgcaacctcaggcccaacagaccacgcagacaacgaccaccgcagcgggtagcgccgccgaccagggcgtaccggccagtggccaggggaaactgatctcggttaagaccgacgtgcttgatctgaccatcaacacccgtggtggtgatgttgagcaagctctgctgcctgcttacccgaaagagctgaactctacccagccgttccagctgttggaaacttcaccgcagtttatttatcaggcacagagcggtctgaccggtcgtgatggcccggataacccggctaacggcccgcgtccgctgtataacgttgaaaaagacgcttatgtgctggctgaaggtcaaaacgaactgcaggtgccgatgacgtataccgacgcggcaggcaacacgtttaccaaaacgtttgtcctgaaacgtggtgattacgctgtcaacgtcaactacaacgtgcagaacgctggcgagaaaccgctggaaatctcctcgtttggtcagttgaagcaatccatcactctgccaccgcatctcgataccggaagcagcaacttcgcactgcacaccttccgtggcgcggcgtactccacgcctgacgagaagtatgagaaatacaagttcgataccattgccgataacgaaaacctgaacatctcttcgaaaggtggttgggtggcgatgctgcaacagtatttcgcgacggcgtggatcccgcataacgacggtaccaacaacttctataccgctaatctgggtaacggcatcgccgctatcggctataaatctcagccggtactggttcagcctggtcagactggcgcgatgaacagcaccctgtgggttggcccggaaatccaggacaaaatggcagctgttgctccgcacctggatctgaccgttgattacggttggttgtggttcatctctcagccgctgttcaaactgctgaaatggatccatagctttgtgggtaactggggcttctccattatcatcatcacctttatcgttcgtggcatcatgtacccgctgaccaaagcgcagtacacctccatggcgaagatgcgtatgttgcagccgaagattcaggcaatgcgtgagcgtctgggcgatgacaaacagcgtatcagccaggaaatgatggcgctgtacaaagctgagaaggttaacccgctgggcggctgcttcccgctgctgatccagatgccaatcttcctggcgttgtactacatgctgatgggttccgttgaactgcgtcaggcaccgtttgcactgtggatccacgacctgtcggcacaggacccgtactacatcctgccgatcctgatgggcgtaacgatgttcttcattcagaagatgtcgccgaccacagtgaccgacccgatgcagcagaagatcatgacctttatgccggtcatcttcaccgtgttcttcctgtggttcccgtcaggtctggtgctgtactatatcgtcagcaacctggtaaccattattcagcagcagctgatttaccgtggtctggaaaaacgtggcctgcatagccgcgagaagaaaaaatcctga

SEQ ID NO: 221 - DNA, 1629 bp, Escherichia coli
  CDS (1)...(1629)
atgaaaactcgcgactcgcaatcaagtgacgtgattatcattggcggcggcgcaacgggagccgggattgcccgcgactgtgccctgcgcgggctgcgcgtgattttggttgagcgccacgacatcgcaaccggtgccaccgggcgtaaccacggcctgctgcacagcggtgcgcgctatgcggtaaccgatgcggaatcggcccgcgaatgcattagtgaaaaccagatcctgaaacgcattgcacgtcactgcgttgaaccaaccaacggcctgtttatcaccctgccggaagatgacctctccttccaggccacttttattcgcgcctgcgaagaagcagggatcagcgcagaagctatagacccgcagcaagcgcgcattatcgaacctgccgttaacccggcactgattggcgcggtgaaagttccggatggcaccgttgatccatttcgtctgaccgcagcaaacatgctggatgccaaagaacacggtgccgttatccttaccgctcatgaagtcacggggctgattcgtgaaggcgcgacggtgtgcggtgttcgtgtacgtaaccatctcaccggcgaaactcaggcccttcatgcacctgtcgtggttaatgccgctgggatctgggggcaacacattgccgaatatgccgatctgcgcattcgcatgttcccggcgaaaggatcgctgctgatcatggatcaccgcattaaccagcatgtgatcaaccgctgccgtaaaccttccgacgccgatattctggtgcctggcgataccatttcgctgattggtaccacctctttacgtattgattacaacgagattgacgataatcgagtgacggcagaagaggttgatattctgctgcgtgaaggggaaaaactggcccccgtgatggcgaaaacgcgcattttgcgggcctattctggcgtgcgcccgctggttgccagcgatgacgacccgagcggacgtaacgtcagccgtggcatcgtgctgctcgaccatgctgaacgcgatggtctggacggatttatcaccatcaccggtggcaaactgatgacctatcggctgatggctgaatgggctaccgacgcggtatgccgcaaactgggcaacacgcgcccctgtacgactgccgatctggcactgcctggttcacaagaacccgctgaagttaccttgcgtaaagtcatctccctgcctgccccgctgcgcggttctgcggtttatcgtcatggcgatcgcacgcctgcctggctgagcgaaggccgtctgcaccgtagcctggtatgtgagtgcgaagcggtaactgcgggtgaagtgcagtacgcggtagaaaatttaaacgttaatagcctgctggatttacgccgtcgtacccgtgtggggatgggcacctgccagggcgaactctgcgcctgccgcgctgccggactgctgcaacgttttaacgtcacgacgtccgcgcaatctatcgagcaactttccaccttccttaacgaacgctggaaaggcgtgcaacccatcgcctggggagatgcactgcgcgaaagcgaatttacccgctgggtttatcagggattgtgtggtctggagaaggagcagaaagatgcgctttga

SEQ ID NO: 222 - DNA, 1260 bp, Escherichia coli
  CDS (1)...(1260)
atgcgctttgatactgtcattatgggcggcggcctcgccggattactctgtggcctgcaactgcaaaaacacggcctgcgctgtgccattgtcactcgtggtcaaagcgcactgcatttctcatccggatcgctggatttgctgagccatctgccagatggtcaaccggtgacagacattcacagtggactggaatctttgcgtcagcaggcaccagcccatccttactcccttctcgagccacaacgcgtgctcgatctcgcttgccaggcgcaggcattaatcgctgaaagcggtgcgcaattgcagggcagcgtagaacttgctcaccagcgggttacgccgctcggcactctgcgctctacctggctaagttcgccagaagtccccgtctggccgctgcccgcgaagaaaatatgtgtagtgggaattagcggcctgatggattttcaggcgcaccttgcggcagcttcgttgcgtgaactcggccttgccgttgaaaccgcagaaatagagctgccggaactggatgtgctgcgcaataacgccaccgaatttcgcgcggtgaatatcgcccgtttccttgataatgaagaaaactggccgctgttacttgatgcgcttattcctgtcgccaatacctgcgaaatgatcctgatgcccgcctgcttcggtctggccgatgacaaactgtggcgttggttgaatgaaaaactaccttgttcactgatgcttttgccaacgctgccgccttccgtgctgggcattcgtctgcaaaaccagttacagcgccagtttgtgcgccagggtggcgtgtggatgccgggcgatgaagtgaaaaaagtgacctgtaaaaatggcgtagtgaacgaaatctggacccgcaatcacgccgatattccgctacgtccacgtttcgcggttctcgccagcggcagtttctttagtggcggactggtagcggaacgtaacggcattcgagagccgattctcggccttgatgtgctacaaaccgccacgcggggtgaatggtataagggagatttttttgcgccgcaaccgtggcagcagttcggtgtaaccactgatgagacgctacgcccgtcacaggcagggcaaaccattgaaaacctgtttgccatcggttcggtgctgggcggatttgatcccatcgcccagggatgcggcggcggtgtttgtgccgtcagtgctttacatgccgctcaacagattgcccaacgcgcaggaggccaacaatga

SEQ ID NO: 223 - DNA, 1191 bp, Escherichia coli
  CDS (1)...(1191)
atgaatgacaccagcttcgaaaactgcattaagtgcaccgtctgcaccaccgcctgcccggtgagccgggtgaatcccggttatccagggccaaaacaagccgggccggatggcgagcgtctgcgtttgaaagatggcgcactgtatgacgaggcgctgaaatattgcatcaactgcaaacgttgtgaagtcgcctgcccgtccgatgtgaagattggcgatattatccagcgcgcgcgggcgaaatatgacaccacgcgcccgtcgctgcgtaattttgtgttgagtcataccgacctgatgggtagcgtttccacgccgttcgcaccaatcgtcaacaccgctacctcgctgaaaccggtgcggcagctgcttgatgcggcgttaaaaatcgatcatcgccgcacgctaccgaaatactccttcggcacgttccgtcgctggtatcgcagcgtggcggctcagcaagcacaatataaagaccaggtcgctttctttcacggctgcttcgttaactacaaccatccgcagttaggtaaagatttaattaaagtgctcaacgcaatgggtaccggtgtacaactgctcagcaaagaaaaatgctgcggcgtaccgctaatcgccaacggctttaccgataaagcacgcaaacaggcaattacgaatgtagagtcgatccgcgaagctgtgggagtaaaaggcattccggtgattgccacctcctcaacctgtacatttgccctgcgcgacgaatacccggaagtgctgaatgtcgacaacaaaggcttgcgcgatcatatcgaactggcaacccgctggctgtggcgcaagctggacgaaggcaaaacgttaccgctgaaaccgctgccgctgaaagtggtttatcacactccgtgccatatggaaaaaatgggctggacgctctacaccctggagctgttgcgtaacatcccggggcttgagttaacggtgctggattcccagtgctgcggtattgcgggtacttacggtttcaaaaaagagaactaccccacctcacaagccatcggcgcaccactgttccgccagatagaagaaagcggcgcagatctggtggtcaccgactgcgaaacctgtaaatggcagattgagatgtccacaagtcttcgctgcgaacatccgattacgctactggcccaggcgctggcttaa

SEQ ID NO: 224 - DNA, 909 bp, Escherichia coli
  CDS (1)...(909)
atgcaattacgtaaacctgccacagcaatcctcgccctggcgctttccgcaggactggcacaggcagatgacgccgccccggcagcgggcagtactctggacaaaatcgccaaaaacggtgtgattgtcgtcggtcaccgtgaatcttcagtgcctttctcttattacgacaatcagcaaaaagtggtgggttactcgcaggattactccaacgccattgttgaagcagtgaaaaagaaactcaacaaaccggacttgcaggtaaaactgattccgattacctcacaaaaccgtattccactgctgcaaaacggcactttcgattttgaatgtggttctaccaccaacaacgtcgaacgccaaaaacaggcggctttctctgacactattttcgtggtcggtacgcgcctgttgaccaaaaagggtggcgatatcaaagattttgccaacctgaaagacaaagccgtagtcgtcacttccggcactacctctgaagttttgctcaacaaactgaatgaagagcaaaaaatgaatatgcgcatcatcagcgccaaagatcacggtgactctttccgcaccctggaaagcggtcgtgccgttgcctttatgatggatgacgctctgctggccggtgaacgtgcgaaagcgaagaaaccagacaactgggaaatcgtcggcaagccgcagtctcaggaggcctacggttgtatgttgcgtaaagatgatccgcagttcaaaaagctgatggatgacaccatcgctcaggtgcagacctccggtgaagcggaaaaatggtttgataagtggttcaaaaatccaattccgccgaaaaacctgaacatgaatttcgaactgtcagacgaaatgaaagcactgttcaaagaaccgaatgacaaggcactgaactaa

SEQ ID NO: 225 - DNA, 987 bp, Escherichia coli
  CDS (1)...(987)
atgaataacagcgcttttactttccagacactacacccggataccatcatggacgctctgtttgagcatgggatccgggtggattccggtcttaccccgcttaacagctatgaaaaccgtgtctatcaatttcaggacgaagatcgtcgacgttttgtcgtcaaattttatcgccctgaacgttggacagccgatcaaatcctcgaagaacatcaatttgcgttgcagctggtaaatgatgaagttccggtcgcagcacctgtggcctttaacggtcagactttattgaatcatcagggattttatttcgctgtttttccaagcgtcggtggtcgccagttcgaagctgataatatcgatcagatggaagcggttgggcgttatttagggcgtatgcaccagacggggcgcaaacagctttttatccatcgcccgaccatcggtttgaacgaatatctcattgagccacgcaagctgtttgaggacgctacactgataccttccgggttgaaagcggcattcctgaaagcgacagatgagctgattgccgccgttacagcacactggcgggaagatttcaccgttctgcggctacatggagactgccacgccgggaatattctctggcgcgatggtccaatgtttgttgatctggatgatgcacgtaatggtccagccgttcaggatttgtggatgttgctcaatggcgataaagccgagcagcggatgcaactggaaactattattgaagcttatgaagaatttagcgagttcgacaccgctgaaatcggactgattgaacctttacgcgccatgcgtttggtttattatcttgcctggctaatgcggcgttgggctgatcccgcgttcccgaaaaatttcccgtggttaaccggggaagattactggctgcgacagacggcgacttttatagaacaggcaaaagttctacaagaaccccctttgcaattaacacctatgtattaa

SEQ ID NO: 226 - DNA, 627 bp, Escherichia coli
  CDS (1)...(627)
atgaaaaagatttggctggcgctggctggtttagttttagcgtttagcgcatcggcggcgcagtatgaagatggtaaacagtacactaccctggaaaaaccggtagctggcgcgccgcaagtgctggagtttttctctttcttctgcccgcactgctatcagtttgaagaagttctgcatatttctgataatgtgaagaaaaaactgccggaaggcgtgaagatgactaaataccacgtcaacttcatgggtggtgacctgggcaaagatctgactcaggcatgggctgtggcgatggcgctgggcgtggaagacaaagtgactgttccgctgtttgaaggcgtacagaaaacccagaccattcgttctgcttctgatatccgcgatgtatttatcaacgcaggtattaaaggtgaagagtacgacgcggcgtggaacagcttcgtggtgaaatctctggtcgctcagcaggaaaaagctgcagctgacgtgcaattgcgtggcgttccggcgatgtttgttaacggtaaatatcagctgaatccgcagggtatggataccagcaatatggatgtttttgttcagcagtatgctgatacagtgaaatatctgtccgagaaaaaataa

SEQ ID NO: 227 - DNA, 339 bp, Escherichia coli
  CDS (1)...(339)
atgacgatgaattcattcgagcgaaggaataagatcatccaattagtgaatgaacagggaaccgtgcttgttcaggatctggcgggagtatttgctgcctcggaagcgacaatccgtgccgatttgcgctttctcgaacaaaaaggcgtggttacgcgctttcatggcggtgcggcgaaaataatgtctggtaatagtgaaaccgagacccaggaagtcgggtttaaagagcgatttcagctcgccagcgcgccaaaaaacagaatagcgcaggcggcagtcaaaatgatccacgaagggatgactgatcctacccacgtaatatggacacaggcctaa

SEQ ID NO: 228 - DNA, 1041 bp, Escherichia coli
  CDS (1)...(1041)
atgaaatcagtggtgaatgatactgatggtatcgtgcgcgttgcagaaagcgtcattcctgaaattaaacatcaggatgaggtgcgggtaaaaattgccagctcgggcttatgtggttccgatttacccaggatatttaaaaatggtgcacattattatccaataacgttaggccatgaatttagcggctatattgatgcggtgggatccggtgttgatgatttacaccctggcgatgcggttgcctgtgtgccgttattaccctgttttacttgtccagagtgtctgaaagggttttattcccagtgcgcaaaatatgattttattggctcgcggcgtgatggtggatttgctgaatatattgtcgttaagcgaaaaaatgtctttgctctacccacggatatgcctattgaggatggggcttttattgagccgattaccgttggtctgcatgcttttcatttagcgcaaggttgtgagaataaaaacgttattattattggtgccggaaccattggcctgctggccattcagtgcgctgtcgcgctgggagcaaagagtgtgacggcgatcgacattagttcagaaaaactggcactggcaaaatctttcggtgcgatgcaaacatttaacagtagcgaaatgagcgcgccgcaaatgcagagcgttttacgcgaactgcgctttaatcagcttatcctcgagacggctggcgtaccgcaaactgtcgaactggcggtagagattgccggtcctcatgcccaactggcgctggtgggcacgttgcatcaggatctgcatttaacatcggcaacgtttggcaaaatattgcgtaaagagctgacggttatcggcagttggatgaactactccagcccttggccggggcaggagtgggaaacggcgagccggttgctgacagaacgtaagttaagcctggagccattaatcgctcaccgtggaagctttgaaagcttcgcccaggcggtgcgtgacatcgctcgtaatgctatgccgggcaaagtgttgctcattccctga

SEQ ID NO: 229 - DNA, 1356 bp, Escherichia coli
  CDS (1)...(1356)
atgttttcagaagtcatgcgttatattctcgacctcggccctacggtgatgctgccgattgtcatcattattttttctaaaatattaggcatgaaggcaggcgattgctttaaagcgggtctgcatatcgggattggctttgttggcattggccttgtgattggcttaatgctggattccattggcccggcggcgaaagcgatggcggaaaatttcgacctgaatctgcatgtggtcgatgttggctggccgggctcttcaccaatgacctgggcgtcgcaaattgcgctggtggcgattccgattgcgattctggttaacgtggcgatgttactgacccgtatgacgcgggtggtaaatgttgatatctggaatatctggcatatgaccttcaccggcgcgttgctgcatctggcaaccggttcatggatgatagggatggcaggtgtggtaattcacgcggcgtttgtttataagctcggcgactggtttgcccgcgatacccgaaatttctttgagctggaaggtattgctattccgcacggtacgtcggcgtatatggggccgattgcggtgctggtcgatgctatcatcgagaaaatcccaggcgttaaccgaattaaatttagcgccgacgatattcagcgcaaatttggtccatttggcgagcctgtcaccgtgggttttgtgatggggctgattatcggcatcctcgcgggttacgatgtcaaaggtgtattgcagctggcggtaaaaacggcggcagtgatgctgctaatgccacgggtgattaaacccatcatggatggtttaacgcccatcgctaagcaggctcgtagtcgtttacaggcgaagttcggcggtcaggagttcctgattggccttgatccggcgttgctgctgggacatacggcggtggtatcggcaagcctgatttttatcccactcaccattttaattgctgtttgtgtgccgggtaatcaggtgctgccgtttggcgatcttgccaccatcggcttcttcgtggcgatggcggtcgccgtgcatcgtggaaatctgttccgcaccttaatctcgggtgtcatcattatgagcatcaccctgtggatcgcgacgcaaactattggtttgcacacccaactggcggctaatgctggggcgttaaaagccgggggtatggtggcttcaatggatcagggcggttctcccattacctggttactgattcaggttttctccccgcaaaatattcccggtttcattattatcggtgcaatttatctgaccggtattttcatgacctggcgtagagcgcgtggctttattaaacaagagaaagtcgttctcgcagaataa

SEQ ID NO: 230 - DNA, 285 bp, Escherichia coli
  CDS (1)...(285)
atgaaacgcaagattattgtcgcttgcggaggcgcggttgcgacctctacgatggcggcggaagaaattaaagagttgtgtcagaatcataatattcctgttgaattaatccagtgtcgggttaatgaaatagaaacctatatggatggtgtgcatttgatatgcaccactgccaaagtggatcgtagttttggcgatattccgttagttcacggcatgccttttatttctggtatcggtatcgaagcattacaaaataaaattctgactatcttacaggggtga

SEQ ID NO: 231 - DNA, 453 bp, Escherichia coli
  CDS (1)...(453)
atgactaacctgtttgttcgtagcggaatttcttttgtcgatcgtagcgaagttttaacccatatcggtaatgagatgctcgccaaaggtgtggttcatgatacctggccacaggcattaattgccagagaagcagaattccctaccgggataatgcttgagcagcacgctattgcaataccgcattgtgaggcgattcatgctaagtcgtcagccatttatctgttaaggccaacaaataaagttcattttcagcaagcggatgatgataacgacgtggcggtatcgttggttattgcgttgattgtggaaaatccgcagcagcaattgaaacttttacgctgtttatttggcaagttacaacagcccgatatcgtcgagacactaatcactcttcctgaaacccagttaaaggaatacttcacaaagtatgttttagattcagacgaataa

SEQ ID NO: 232 - DNA, 1263 bp, Escherichia coli
  CDS (1)...(1263)
atgaaaacgttaattgcccggcataaagctggtgaacatatcggcatatgttcagtctgttctgcccatccgttggttatcgaagcggcgctggcatttgatcgcaacagcacgcgcaaagtgctgattgaagcaacgtcaaaccaggtcaatcaatttggcggttataccggaatgacaccggcagactttcgcgaatttgtttttacgattgccgataaagttgggtttgcacgcgaacgcattattctcggcggcgatcatctggggccaaactgctggcagcaagaaaatgcggatgcggcgatggaaaaatccgtcgagctggtaaaggaatatgttcgtgccggcttcagtaaaattcatcttgatgcgtcaatgtcctgcgcgggggatcccataccgttagcaccagaaacggttgcggaacgagctgctgtgctttgctttgctgcggaaagtgtggcgacagattgccagcgtgagcaactgagctatgtcattggcaccgaagttccggttccgggcggtgaggccagcgccattcagtcagtacacatcacccatgttgaagatgccgccaatactttacgtacgcatcaaaaggcctttattgcccgtgggctgacagaggcgttaacacgtgtgattgccatcgtggtgcagccgggtgtggaatttgatcacagcaatattatccattatcagccgcaggaagcgcagccgctggcgcaatggatagaaaacacccgaatggtttatgaagcacattctaccgattaccagacccggacggcttattgggaattagtccgcgatcactttgcaatattgaaagtcggtcccgcattaacctttgctttacgcgaggcgatatttgcactggcacaaattgagcaggaacttatcgcccctgaaaatcgcagcggttgcctggcggtaattgaagaagtgatgctcgacgaaccgcaatactggaaaaaatattatcgtacgggttttaacgattcattactggatattcgttacagcctgtcggatcgtattcgttattactggccgcatagtcggattaaaaatagcgtcgaaacgatgatggtgaatcttgaaggcgtggacatcccactgggcatgattagtcagtatcttcccaaacaatttgaacgcattcagtccggggaattatcagcaataccgcatcagctgattatggataaaatttatgatgttttgcgcgcctatcgctacggctgtgcggaataa

SEQ ID NO: 233 - DNA, 861 bp, Escherichia coli
  CDS (1)...(861)
atgaaaatgtacgtggtatcgacaaagcagatgctgaacaacgcacagcgcggcggttatgcggttccggcattcaatattcacaatctcgaaacgatgcaagtggtggtagaaaccgctgccaacctgcatgcgccggtcatcatcgccggaacgcctggcacatttactcatgctggtacagaaaatctgttggcgctggtcagcgcgatggcgaagcaatatcaccatccactggcaattcatctcgaccatcacacgaaatttgacgatatcgctcagaaggttcgttctggcgtgcgctcagtcatgattgacgcctcgcatttgccttttgcgcaaaatatttcacgggtcaaagaggtggtggatttttgccatcgctttgatgtcagcgtcgaggcggagctggggcaacttggcggccaggaagatgatgtgcaagtcaatgaagccgatgcgttgtacaccaaccccgctcaggcgcgtgaatttgccgaggcaaccggaattgattccctggcggtcgccatcggcacggctcatgggatgtatgccagcgcaccggcgcttgatttttctagactggagaacattcgccagtgggtgaacttaccgctggtgctgcatggcgcgtcagggttatcgactaaggatattcagcaaaccatcaaactggggatatgcaaaatcaacgttgcaacggagctgaaaaatgccttctcgcaggcgttaaaaaattacctgaccgagcaccctgaagcgaccgatccccgggattatttgcagtcggctaaatccgcaatgcgcgatgtggtgagcaaagtgattgccgattgtggctgcgagggcagggcataa

SEQ ID NO: 234 - DNA, 474 bp, Escherichia coli
  CDS (1)...(474)
atgagtcaaaacgatatcattatcagaactcattataagtctcctcatagattgcacatcgatagcgacataccaacaccttcatcagagcctattaatcaatttgcgcgccagctcatcaccctacttgatacctctgacttaagttcgatgctgtcatactgtgttactcaggaatttaccgcaaactgtcgaaaaatatcacaaaattgttattccactgccctttttaccattaactttgccacttcacccatccatacagaaaatatactcattacattacactataaaaaagaaatcatttccttattactggaaaccacgcctattaaagctaaccatttgcgaagcatactggattatattgaacaggaacagttaactgctgaagatcgtaaccattgtatgaaactgtctaaaaaaatccatagagaaaaaaactatacacccaacagtaaatctcaatggtag

SEQ ID NO: 235 - DNA, 1416 bp, Escherichia coli
  CDS (1)...(1416)
ttgcaatctccttctgacgctattttttgtcgccatctgtcattgcaatacgcccttgattcattgagaaatggaaaaggcaaagtcaacctgattaaacattactcctccgttgaatccatacagcagcatgtccccttagtccgggacgcggagttcagagcattacttcgccatcctcctgcagggagtcgcgttatcgcgagtaaggattttggcttcgctttagatattttcttttgtcgaatgatggcaaacaatgtcagtcatatgtccgcgattttatatatagacaatcatactttgtcagtaaggctacgaataaagcagtcagtgtatggacaattaaattatgttgtgtccgtttacgacccgaacgataccaacgttgccgtcagagacacccacaggacagcacggggctttctttcgcttgataagttcatcagttcaggtcccgatgctcagacctgggctgatagatatgttcgcaactgtgcaattgctattctgcccctattacctgtgggagttccaggggctattttcgcgggtattgcatcacgaatgccatttgcccctatacatccatcggcaatgttgttaataatggctacaggccagtctcaacagcttattacattattcaaacagttgcccatactccctgaaaaagaaatcattgaaataataactgcgcagaatagcgttggtacacctgctttatttttggctatgatgaacggacatactgacaacgtgaaaatatttatgcaagaaattcagtcactggtagataatcacatcattcatgaagataatctggttaaattactgcaaactaaaagtgctaacgaaacacctggactttatatctccatgttgtatggattcgatgaaataatcgatatctttctgaatgcattaaccactccaatagcacaagagcttttaaacaaaaaactggtgatgagtattttagccatgaaaatacatgatggtgagccaggattatacgccgcaatggaaaataatcaccctttgtgtgtcacacggttcctctctaaaattaatggcatcgcctttaaatacaagttgagcaaagctaacatcatggatttattaaaaggagctacagcacagggaacccctgcattatacatcgccatgagcaagggtaatgaagacgtcgtgttatcttatatatcgacgctgggtgcttttgcaaaaaaacattcttttagtcaacatcagttatttacactattggccgctaaaaatcatgacaacatgtcagctgttcatatagccattcatcataagcattataaaactgtagaaacatattatgctgctattaatgcaatcagccaaagcctgagttttagtgctgatgaaataaagacgtatttataa

SEQ ID NO: 236 - DNA, 387 bp, Escherichia coli
  CDS (1)...(387)
atgccatctggattatttatggacttattgccttttttactggacgcgaacctcagcgcgacaaacccacccgctattccgcactggtggaagcgtcaaccgcttattcccaaccttctgtcacaggaactgaaaaactatctgaagcttaatgttaaagagaaaaatattcagattgcagaccaggtaattattgatgaaactgcaggtgaagttgttatcggcgcgaatacccgtatttgtcatggtgccgttattcagggtccggtagtgattggcgcaaactgcctgataggtaattggatttgcccctatatttccagacatctgttatcacttaacccattacaagcccgctgccgcagatattcccgtggcgagcgataa

SEQ ID NO: 237 - DNA, 1197 bp, Escherichia coli
  CDS (1)...(1197)
atgaaaacctggatatttatctgtatgtccatagcaatgttgctatggtttttaagtacgctaagacgtaaacccagtcaaaagaaaggctgtattgacgccattatacctgcgtataacgaaggcccgtgtctggcgcagtcactggataatctactgcgtaacccttatttttgccgggtaatttgcgttaacgacggctccacggacaataccgaagcggtcatggcggaagtcaaacgcaaatggggcgaccgctttgttgccgtcacgcaaaaaaataccggtaaaggtggtgcgctgatgaatggcctcaattacgccacctgcgaccaggtttttttaagtgatgccgacacctatgttccgcccgatcaagacggaatgggctatatgctggcagaaattgagcgcggtgccgatgccgtaggcggcattccctctactgcgttgaaaggcgcgggtctgttaccgcacatccgcgcgaccgtaaagttgccgatgattgttatgaagcgcacgctacagcagctcctgggtggcgcaccgtttattatcagcggtgcctgcgggatgttccgtactgatgtattgcgtaagttcggtttctcggatcgtactaaagtcgaagaccttgatctcacctggacattggtggcaaacggctaccgtattcggcaggcgaatcgctgcatcgtatacccacaggaatgcaacagcccgcgtgaggagtggcgtcgctggcggcgttggattgtgggatacgcggtctgtatgcgcctgcataaaagacttttatttagccgcttcggtatcttcagtatatttcctatgctgttggttgtgctttatggcgttgggatttatctcactacctggtttaatgaattcatcaccaccgggccgcatggagtggtgttggcaatgtttccgcttatctgggtcggcgtagtttgtgttattggtgcttttagcgcctggtttcatcgttgctggttgttggtgcctttagcgccgctttccgttgtgtatgtattattagcttatgccatctggattatttatggacttattgccttttttactggacgcgaacctcagcgcgacaaacccacccgctattccgcactggtggaagcgtcaaccgcttattcccaaccttctgtcacaggaactgaaaaactatctgaagcttaa

SEQ ID NO: 238 - DNA, 1659 bp, Escherichia coli
  CDS (1)...(1659)
atgattcttgagcgcgttgaaattgtgggttttcgcggtatcaaccgtttgtcgttgatgctggaacaaaacaacgtcctgattggggagaacgcgtggggtaaatccagcttgctggacgccttaactctgctgctatcgccagaatcagatctctaccattttgagcgcgacgatttctggttcccgccgggagatatcaacgggcgagaacatcatctgcatattattttgaccttccgcgaatcgctgccaggccgacatcgggttcgccgttatcggccgctggaagcgtgctggacgccatgcaccgatggctatcaccgtattttttatcgtctggaaggggagagtgcggaagacggcagcgtgatgacactgcgcagttttctcgataaagacggacatccgattgatgtcgaggatattaacgatcaggcacgccatctggtgcgtttaatgccggtgctgcgcttgcgtgatgcccgttttatgcgccgtattcgtaacggcacggtgccaaatgtccctaatgtggaagtcaccgcgcgccagctcgatttcctcgcccgtgagttatcctcacatccgcaaaatctctctgatgggcagattcgtcagggactttccgcaatggtacagctgcttgagcattatttctctgagcagggggccggacaggcgcgatatcgtttaatgcggcggcgagccagcaatgagcaacgaagctggcgctatctggatatcatcaaccggatgattgaccgacctggtgggcgctcgtatcgggttattttgctcggcctatttgctactttgttgcaggcaaaaggcacattgcgactggataaagacgcccgtccattgttgctgatcgaagatccagaaacccgtttacaccccattatgctttcagttgcctggcatctgttgaatcttctgccattgcagcgcattgccaccaccaactcgggtgagttgctttcgttaacgccggtagagcatgtttgccgactggtacgtgagtcctcgcgcgttgccgcctggcgtctggggccgagtggcttgagtaccgaagatagccgacgcatatcctttcacattcgttttaaccgtccgtcatcgctgtttgcacgctgctggttgctggtggaaggggaaacggaaacctgggttatcaatgaactggcgcgtcagtgcggacatcattttgatgccgaagggatcaaggtcattgagtttgcccagtccgggctaaagccactggttaaatttgcccgccgaatggggattgaatggcatgtactggtcgatggcgatgaagcagggaagaaatatgccgctacggtacgcagcctgttgaataacgatcgggaagccgaacgagaacatttaacggcgttaccggcgctggatatggaacattttatgtatcgccagggattttccgatgtgttccaccgcatggcgcaaatcccggaaaatgtaccgatgaatctacgcaaaattatctcgaaagcgatccatcgctcttccaaacccgatcttgccattgaagtggcaatggaggcaggacgtcgtggtgtggactccgtaccgacgctgctgaaaaaaatgttctcacgcgtgctgtggctggcgcgcggtcgcgcggattaa

SEQ ID NO: 239 - DNA, 1059 bp, Escherichia coli
  CDS (1)...(1059)
atgctaccatctatttcaatcaacaataccagcgcagcttacccagaatccatcaatgaaaataacaatgatgaagttaatggattagtacaagagttcaaaaacctttttaatggtaaggaaggaataagcacctgtattaaacatctacttgagcttataaaaaacgccatacgagtaaacgacgatccttatagatttaatattaataattcctcagttacttatattgatattgactccaatgatacagaccatattactattggtatcgacaaccaagaaccaatagaattacctgcgaactataaagacaaagaactcgtccgtactatcattaatgacaacatagttgagaagactcatgatatcaataacaaggaaatgatcttcagcgcattaaaagaaatatatgatggagatcctggttttatcttcgataagatatcacacaaactcagacatacggtaacggaatttgatgagagcgggaaaagcgaaccaacggacttatttacctggtacggtaaagataaaaaaggcgactctctcgctattgtaattaaaaataaaaacggaaatgattacttatctctcggttactacgatcaggacgactaccacattcaaagaggaattcgtattaatggtgatagtctcacccaatattgtagtgaaaacgccaggagtgcttcagcgtggtttgaaagcagtaaagctatcatggcagaatcatttgcaactggttccgatcatcaggttgtaaacgagctcaacggggaaagactgagagaaccaaacgacgtttttaaacgttatggtcgagcaataagatatgattttcaagtggacgatgcaaaatataaatgcgaccatctaaaagaaatagtttctactttagtcggtaacaaaattaacgttggccattctcaaaaaatatataagcattttaaggatctcgaaggtaaaattgaagaaaggcttcaaaatcgccaggctgaatatcaaaatgaaattaatcaaccatctgcgccaggtgttaattttgatgatatttaa

SEQ ID NO: 240 - DNA, 1128 bp, Escherichia coli
  CDS (1)...(1128)
atgatgcgccatttacgcaatatttttaatctgggtatcaaagagttgcgcagtctgctcggtgataaagcgatgctgacgctgattgtcttctcgtttacggtgtcggtgtattcgtcagcgaccgttacgccaggatcgttgaacctcgcgccgatcgccattgccgatatggatcaatcgcagttatcgaaccggatcgttaacagcttctatcgtccgtggtttttgccaccggagatgatcaccgccgatgagatggatgccggactggacgccggacgctataccttcgcgataaatattccgcctaattttcagcgtgatgtcctcgccggacgccagccggatattcaggtgaacgtcgatgccacgcgcatgagccaggcatttaccggcaatgggtatatccagaatattatcaacggtgaagtgaacagctttgtcgcgcgctaccgtgataacagcgaaccgttggtatcgctggaaacccggatgcgctttaacccgaacctcgatcccgcgtggtttggcggggtgatggcgatcatcaacaacattaccatgctggcgattgtattgaccggatcggcgctgatccgcgagcgtgaacacggcacggtggaacacttactggtgatgccgataacgccgtttgagatcatgatggcgaagatctggtcgatggggctggtggtgctggtggtatcgggattatcgctggtgctgatggtgaaaggtgtactgggcgtaccgattgaaggctcgatcccgctgtttatgctgggcgtggcgctcagtctgtttgccaccacgtcaatcggcatttttatggggacgatagcgcgttcaatgccgcaactggggctgctggtgattctggtgctgctgccgctgcaaatgctttccggtggttccacgccgcgcgaaagtatgccgcagatggtgcaggacattatgctgaccatgccgacgacacactttgttagcctcgcgcaggccatcctctaccggggtgccggattcgaaatcgtctggccgcagtttctgacgctgatggcaattggcggcgcatttttcaccattgcgctgctgcgattcaggaagacgattgggacaatggcgtaa

SEQ ID NO: 241 - DNA, 2685 bp, Escherichia coli
  CDS (1)...(2685)
gtgagccagcattatggaaaaaccgttgcgctgaacaatatcactctcgatattccggcccgctgtatggtcgggctgattggcccggacggcgtcgggaagtcgagcttgttgtcgttgatttccggtgcccgcgtcattgaacagggcaatgtgatggtgctgggcggcgatatgcgcgacccgaagcatcgccgcgacgtctgcccgcgcatcgcctggatgccgcaggggctgggcaaaaacctctaccacaccttgtcggtgtatgaaaacgtcgattttttcgctcgcctgttcggtcacgacaaagcggagcgggaagtgcgaatcaatgagctgctgaccagcaccgggttagcaccgtttcgcgatcgtccggcagggaaactctccggcgggatgaagcaaaaacttgggctgtgctgcgcgttaatccacgacccggaactgttgatccttgatgagccaacaacgggggttgacccgctctcccgctcccagttctgggatctgatcgacagtattcgccagcggcagagcaatatgagcgtgctggtcgccaccgcctatatggaagaggccgaacgcttcgactggctggtagcgatgaatgccggagaagtgctggcaactggcagcgccgaagagctacggcagcaaacgcaaagcgctacgctggaagaagcatttataaatctgttaccgcaagcgcaacgccaggcgcatcaggcggtagtgatcccaccgtatcaacctgaaaacgcagagattgccatcgaagcgcgcgatctgaccatgcgttttggttccttcgttgccgttgatcacgttaatttccgcattccacgcggggagatttttggttttcttggttcgaacggctgcggtaaatccaccaccatgaaaatgctcaccggactgctgcccgccagcgaaggtgaggcgtggctgttcgggcaaccggttgatccaaaagatatcgatacccgccgtcgggtgggctatatgtcgcaggcgttttcgctctataacgaactcaccgtgcggcaaaaccttgagttacatgcccgtttgtttcacatcccggaagcggaaattcccgcaagagtggctgaaatgagcgagcgttttaagctcaacgacgttgaagatattctgccggagtcattgccgctcggcattcgccagcggctttcgctggcggtggcggtgattcatcgcccggagatgttaatcctcgatgagcctacttctggtgtcgatccggtggcgagggatatgttctggcagttgatggtcgatctctcgcgccaggacaaagtgactatcttcatctccacccactttatgaacgaagcggaacgttgcgaccgcatctcactgatgcacgccggaaaagtgcttgccagcggtacaccgcaggaactggttgagaaacgcggagccgccagtctggaagaggcatttatcgcctatttgcaggaagcggcagggcagagcaacgaagccgaagcgccgcccgtggtacacgacaccacccacgcgccgcgtcagggatttagcctgcgccgtctgtttagctacagccgccgcgaagcgctggaactgcgacgcgatccagtacgttcgacgctggcgctgatgggaacggtgatcctgatgctgataatgggttacggcatcagtatggatgtggaaaacctgcgctttgcggtgctcgaccgcgaccagaccgtcagtagccaggcgtggacactcaacctctccggttcccgttactttatcgaacagccgccgctcaccagttatgacgagcttgatcgtcggatgcgtgcgggcgatatcacggtggcgattgagatcccgcccaatttcgggcgcgatatcgcgcgtggtacgcctgtggaactcggcgtctggatcgacggagcgatgccgagccgtgctgaaacggtaaaaggttacgtgcaggccatgcaccagagctggttacaggatgtggcgagccgacaatcgacacccgccagccaaagcgggctgatgaatattgagacgcgctatcgctataacccggacgtaaaaagcctgccagcgattgttccggcggtgatcccgcttctgctgatgatgatcccgtcaatgctaagcgcccttagcgtggtgcgggaaaaagagcttgggtcgattatcaacctttacgtgacccccaccacgcgtagtgaatttttgcttggtaaacagttgccatacatcgcgctggggatgctgaactttttcctgctctgcggcctgtcggtgtttgtgtttggcgtaccgcataaaggcagtttcctgacgctcaccctggcggcgctgctgtatatcatcattgccaccggaatggggctgctgatctccacctttatgaaaagccagattgccgccattttcggaacggcgattatcacgttgatcccggcgacacagttttccgggatgatcgatccggtagcttcgctggaagggcctggacgttggatcggcgaggtttacccgaccagtcattttctgactatcgcccgcgggacgttctcgaaagcgctggatctgactgatttgtggcaactttttatcccgttactgatagccatcccgctggtgatgggcttaagtatcctgctgctgaaaaaacaggagggatga

SEQ ID NO: 242 - DNA, 1068 bp, Escherichia coli
  CDS (1)...(1068)
atggataagagtaagcgccatctggcgtggtgggttgtcgggttactggcggtggcggctatcgtggcgtggtggctgttgcgcccggcaggtgtgccggaaggctttgctgtcagtaatgggcgcattgaagcgacggaagtggatattgccagcaaaattgccgggcgtatcgacaccattctggtgaaagaaggcaagtttgttcgcgaaggtgaagtgctggcgaagatggatactcgcgtgttgcaggaacagcgactggaagccatcgcgcaaatcaaagaggcacaaagcgccgttgctgccgcgcaggctttgctggagcaacgacaaagcgaaactcgtgccgcacagtcgctggttaatcaacgccaggcagaactggactccgtagcaaaacgtcatacgcgttcccgttcactggcccaacgaggggctatttctgcgcaacagctggatgacgatcgcgccgccgctgagagcgcccgagctgcgctggaatcggcgaaagctcaggtatcggcttctaaagcggctatagaagcggcacgcaccaatatcattcaggcgcaaacccgcgtcgaagcggcacaagccactgaacggcgcattgccgcagatatcgatgacagcgaactgaaagccccgcgtgacggacgcgtgcagtatcgggttgccgagccaggcgaagtgctggcggcaggcggtcgggtgctgaatatggtcgatctcagcgacgtctatatgactttcttcctgccaaccgaacaggcgggcacgctgaaactgggcggtgaagcccggctgatcctcgatgccgcgccagatctgcgtattcctgcaaccatcagttttgtcgccagtgtcgcccagttcacgccaaaaaccgtcgaaaccagcgatgaacggctgaaactgatgttccgcgtcaaagcgcgtatcccaccggaattactccagcagcatctggaatatgtcaaaaccggtttgccgggcgtagcgtgggtgcgggtgaatgaagaacttccgtggcctgacgacctcgtggtgaggttgccgcaatga

SEQ ID NO: 243 - DNA, 708 bp, Escherichia coli
  CDS (1)...(708)
atgtaccgttatttgtctattgctgcggtggtactgagcgcagcattttccggcccggcgttggccgaaggtatcaatagtttttctcaggcgaaagccgcggcggtaaaagtccacgctgacgcgcccggtacgttttattgcggatgtaaaattaactggcagggcaaaaaaggcgttgttgatctgcaatcgtgcggctatcaggtgcgcaaaaatgaaaaccgcgccagccgcgtagagtgggaacatgtcgttcccgcctggcagttcggtcaccagcgccagtgctggcaggacggtggacgtaaaaactgcgctaaagatccggtctatcgcaagatggaaagcgatatgcataacctgcagccgtcagtcggtgaggtgaatggcgatcgcggcaactttatgtacagccagtggaatggcggtgaaggccagtacggtcaatgcgccatgaaggtcgatttcaaagaaaaagctgccgaaccaccagcgcgtgcacgcggtgccattgcgcgcacctacttctatatgcgcgaccaatacaacctgacactctctcgccagcaaacgcagctgttcaacgcatggaacaagatgtatccggttaccgactgggagtgcgagcgcgatgaacgcatcgcgaaggtgcagggcaatcataacccgtatgtgcaacgcgcttgccaggcgcgaaagagctaa

SEQ ID NO: 244 - DNA, 1443 bp, Escherichia coli
  CDS (1)...(1443)
atgtccagaaggcttcgcagaacaaaaatcgttaccacgttaggcccagcaacagatcgcgataataatcttgaaaaagttatcgcggcgggtgccaacgttgtacgtatgaacttttctcacggctcgcctgaagatcacaaaatgcgcgcggataaagttcgtgagattgccgcaaaactggggcgtcatgtggctattctgggtgacctccaggggcccaaaatccgtgtatccacctttaaagaaggcaaagttttcctcaatattggggataaattcctgctcgacgccaacctgggtaaaggtgaaggcgacaaagaaaaagtcggtatcgactacaaaggcctgcctgctgacgtcgtgcctggtgacatcctgctgctggacgatggtcgcgtccagttaaaagtactggaagttcagggcatgaaagtgttcaccgaagtcaccgtcggtggtcccctctccaacaataaaggtatcaacaaacttggcggcggtttgtcggctgaagcgctgaccgaaaaagacaaagcagacattaagactgcggcgttgattggcgtagattacctggctgtctccttcccacgctgtggcgaagatctgaactatgcccgtcgcctggcacgcgatgcaggatgtgatgcgaaaattgttgccaaggttgaacgtgcggaagccgtttgcagccaggatgcaatggatgacatcatcctcgcctctgacgtggtaatggttgcacgtggcgacctcggtgtggaaattggcgacccggaactggtcggcattcagaaagcgttgatccgtcgtgcgcgtcagctaaaccgagcggtaatcacggcgacccagatgatggagtcaatgattactaacccgatgccgacgcgtgcagaagtcatggacgtagcaaacgccgttctggatggtactgacgctgtgatgctgtctgcagaaactgccgctgggcagtatccgtcagaaaccgttgcagccatggcgcgcgtttgcctgggtgcggaaaaaatcccgagcatcaacgtttctaaacaccgtctggacgttcagttcgacaatgtggaagaagctattgccatgtcagcaatgtacgcagctaaccacctgaaaggcgttacggcgatcatcaccatgaccgaatcgggtcgtaccgcgctgatgacctcccgtatcagctctggtctgccaattttcgccatgtcgcgccatgaacgtacgctgaacctgactgctctctatcgtggcgttacgccggtgcactttgatagcgctaatgacggcgtagcagctgccagcgaagcggttaatctgctgcgcgataaaggttacttgatgtctggtgacctggtgattgtcacccagggcgacgtgatgagtaccgtgggttctactaataccacgcgtattttaacggtagagtaa

SEQ ID NO: 245 - DNA, 720 bp, Escherichia coli
  CDS (1)...(720)
atgatcaatgtattaattatcgatgacgacgcaatggtcgcggagctgaatcgccgatacgtagcacaaatcccaggctttcaatgctgtggaacagcctcgacgctggagaaagccaaagagattatcttcaatagcgatacgcctatcgacctgatattgctcgatatctatatgcaaaaagagaacgggctcgatttactgcctgtcctgcataacgcgcgttgcaaaagtgatgtgattgtcatctcctccgcagccgatgcggcaaccattaaagattcgctgcattacggtgtcgtggattacctgatcaaacccttccaggcttcccgctttgaagaggcgctcaccggctggcggcaaaagaaaatggcgctggaaaaacatcagtattatgaccaggccgagcttgatcagctaatccacggcagcagctccaacgaacaggatcctcgtcgcttgccaaaaggcttaacgccgcagacgttacgcacactgtgccagtggattgacgcgcatcaggactatgaattttcaaccgacgagctagccaacgaggttaacatttcgcgtgtttcctgccgtaaatacctcatctggctggtcaactgccacatcttgttcaccagtatccattatggcgtcacggggcgtccagtttaccgttaccgtattcaggcagaacactactcactactgaaacaatattgccaataa

SEQ ID NO: 246 - DNA, 1632 bp, Escherichia coli
  CDS (1)...(1632)
atgagacattcattgccctaccgcatgttacgcaaacgtccgatgaaattgagtaccacagtgatcttaatggtcagtgcggtactgttctcggtgctattggtggtgcatctgatttacttctcgcaaatcagtgatatgacgcgagatgggctagccaacaaggcactggcagtggcgcgtaccctcgccgactcgccggaaatccgtcagggcttgcagaaaaaaccgcaggagagtggcatccaggccatcgcggaagccgtacgcaaacgcaacgatctgctgtttattgtcgttaccgatatgcaaagtcttcgctactcgcatcctgaagcccagcgtattggtcagccatttaaaggtgatgacatccttaaagcgctgaatggcgaagaaaatgtcgctatcaatcgcggttttctggcgcaggctttacgcgtatttacccccatctacgatgaaaatcataaacaaattggcgtggtggcgatcggccttgagttaagccgtgtgacccaacagatcaatgacagtcgctggagcattatctggtcggtattatttggcatgctggtcggactgattggcacctgcattctggttaaggtactgaaaaaaatccttttcggcctggaaccctacgaaatctccacgctgtttgagcaacgccaggccatgttgcagtctatcaaagaaggcgtcgttgccgtggacgatcgcggcgaggtcacgctgatcaacgatgccgcacaagaattgctgaattaccgtaagtcgcaggacgatgagaaactgtcgacgctaagccactcatggtcacaggtggtagatgtctcggaagtgttacgcgacggtaccccgcgccgcgacgaagagattacgattaaagaccggctattactgatcaacaccgttccggtgcgcagtaatggcgttatcatcggtgccatttcaaccttcagggacaaaactgaagtacgtaaactgatgcagcgactcgacggtctggtcaactatgctgacgcacttcgtgaacgatcccacgaatttatgaataaattgcatgtgattctcggattattgcatctgaagagttataagcagttggaagattacattctcaaaacagccaataactatcaggaagagattggctctctgctgggtaagatcaaatctccggttatcgctggttttttaatcagcaagattaaccgcgcgaccgatttaggccatacgctgattttaaacagtgaaagccagctgccagacagcggcagtgaggaccaggtcgcgacgctgattaccacgttgggaaatctgatagaaaacgcgctggaggcattagggccggaacccggaggcgaaattagcgtaacattgcactaccgtcacggctggctgcactgtgaagttaatgatgatggaccggggatcgcacccgataaaatcgatcacatttttgacaaaggtgtctcgacaaaaggaagcgagcgaggcgtcggtttagcacttgtcaaacaacaggtagaaaatctcggcggcagcatcgccgtggaatcggaacccgggattttcacacaattttttgtccagataccctgggacggggagaggtcgaacagatga

SEQ ID NO: 247 - DNA, 987 bp, Escherichia coli
  CDS (1)...(987)
ttgagtgtaccgctgtcgacatggaatcttctgcgatacaacaattcgtatctacagaaggtaactatgtttccacaatgcaaattttcccgcgagtttctacatcctcgctactggctcacatggtttgggcttggtgtactctggctttgggtacagcttccttatcctgttctctgctttctcggcacgcgtattggcgcaatggcgcgaccattcctgaaacgtcgtgaatctatcgcccgtaaaaacctggaactttgtttcccgcagcattctgcggaagaacgcgagaagatgattgccgaaaactttcgttcactcggcatggcgctggtagaaaccggcatggcatggttctggcccgacagtcgcgtacgtaaatggtttgatgttgaagggttggataaccttaaacgcgcacaaatgcaaaatcgcggcgtaatggttgtcggcgtccattttatgtcgctggaactgggcggccgcgtgatgggactgtgccaaccaatgatggctacctatcgtccacataataatcagctgatggaatgggtgcagacccgtgggcgcatgcgctctaacaaagcgatgatcggcagaaataatctgcgcggcattgtcggtgcactgaagaaaggtgaagcggtatggtttgctcccgatcaggattatggtcgtaaaggcagctccttcgcgccgttctttgcggtggaaaatgtcgccacaaccaatggcacctatgttctctcccgtctctctggcgcagccatgttgaccgtaacgatggtaagaaaagcggattacagcggatatcgtttgttcatcaccccagagatggaaggctacccgacagatgaaaatcaagccgctgcctatatgaacaagattatcgagaaagagatcatgcgcgcaccggagcagtacctctggatccaccgtcgctttaaaacgcgcccggtgggagaatcgtcgttgtacatttaa

SEQ ID NO: 248 - DNA, 264 bp, Escherichia coli
  CDS (1)...(264)
ttggctaatatcaaatcagctaagaagcgcgccattcagtctgaaaaggctcgtaagcacaacgcaagccgtcgctctatgatgcgtactttcatcaagaaagtatacgcagctatcgaagctggcgacaaagctgctgcacagaaagcatttaacgaaatgcaaccgatcgtggaccgtcaggctgctaaaggtctgatccacaaaaacaaagctgcacgtcataaggctaacctgactgcacagatcaacaaactggcttaa

SEQ ID NO: 249 - DNA, 1293 bp, Escherichia coli
  CDS (1)...(1293)
atgcgctataatggtttaaataatatgtttttccctctttgcctgattaacgataaccactctgtcacaagtccatcacatacaaagaaaacaaaatcagataattacagcaaacatcataaaaacacgttaattgacaataaagccctctctcttttcaaaatggatgatcatgaaaaagtgataggcttgattcagaaaatgaaaagaatttatgatagtttaccatcaggaaaaatcacgaaagaaacggacaggaaaatacataaatattttatagatatagcttcacatgcaaataataaatgtgacgatagaattacgagaagagtttaccttaataaagataaggaagtgtcaattaaggtggtatattttataaataatgtcaccgtccataataatactatcgaaatcccacagacagtaaatggtggttacgatttttcacaccttagcctgaaaggtatcgtgattaaagatgaagatttatccaattcgaattttgcaggttgcagactacaaaacgctatttttcaggactgtaatatgtataaaacgaattttaatttcgccataatggaaaaaatactttttgataattgtattctcgatgactcaaatttcgctcagataaaaatgactgacggaactctaaattcatgttccgctatgcatgttcaattctacaatgcaacaatgaatagagccaatattaaaaataccttccttgattattcaaatttttatatggcatacatggctgaggtaaatctttataaagtaatagcgccatatattaatttatttagagccgaccttagcttctctaaacttgatttaattaactttgaacatgctgatctgtctcgtgtcaacctgaataaagcaaccctccagaatataaacttaattgatagcaaactcttttttacgcggttaacaaatacgttcctcgaaatggttatatgtaccgactctaatatggctaatgttaattttaataatgccaatttaagcaattgccatttcaactgttctgttttaacaaaagcctggatgtttaatatccgtctctatcgtgttaatttcgatgaggctagcgtccagggaatgggtattaccattctccgtggtgaggaaaatatctccattaatagtgatatcctggtaacactacagaaattctttgaagaagattgtgccactcatactggcatgtcacaaactgaggataatcttcatgcagtcgctatgaagattactgcagatattatgcaagatgcagattga

SEQ ID NO: 250 - DNA, 2652 bp, Escherichia coli
  CDS (1)...(2652)
atgaacgaacaatattccgcattgcgtagtaatgtcagtatgctcggcaaagtgctgggagaaaccatcaaggatgcgttgggagaacacattcttgaacgcgtagaaactatccgtaagttgtcgaaatcttcacgcgctggcaatgatgctaaccgccaggagttgctcaccaccttacaaaatttgtcgaacgacgagctgctgcccgttgcgcgtgcgtttagtcagttcctgaacctggccaacaccgccgagcaataccacagcatttcgccgaaaggcgaagctgccagcaacccggaagtgatcgcccgcaccctgcgtaaactgaaaaaccagccggaactgagcgaagacaccatcaaaaaagcagtggaatcgctgtcgctggaactggtcctcacggctcacccaaccgaaattacccgtcgtacactgatccacaaaatggtggaagtgaacgcctgtttaaaacagctcgataacaaagatatcgctgactacgaacacaaccagctgatgcgtcgcctgcgccagttgatcgcccagtcatggcataccgatgaaatccgtaagctgcgtccaagcccggtagatgaagccaaatggggctttgccgtagtggaaaacagcctgtggcaaggcgtaccaaattacctgcgcgaactgaacgaacaactggaagagaacctcggctacaaactgcccgtcgaatttgttccggtccgttttacttcgtggatgggcggcgaccgcgacggcaacccgaacgtcactgccgatatcacccgccacgtcctgctactcagccgctggaaagccaccgatttgttcctgaaagatattcaggtgctggtttctgaactgtcgatggttgaagcgacccctgaactgctggcgctggttggcgaagaaggtgccgcagaaccgtatcgctatctgatgaaaaacctgcgttctcgcctgatggcgacacaggcatggctggaagcgcgcctgaaaggcgaagaactgccaaaaccagaaggcctgctgacacaaaacgaagaactgtgggaaccgctctacgcttgctaccagtcacttcaggcgtgtggcatgggtattatcgccaacggcgatctgctcgacaccctgcgccgcgtgaaatgtttcggcgtaccgctggtccgtattgatatccgtcaggagagcacgcgtcataccgaagcgctgggcgagctgacccgctacctcggtatcggcgactacgaaagctggtcagaggccgacaaacaggcgttcctgatccgcgaactgaactccaaacgtccgcttctgccgcgcaactggcaaccaagcgccgaaacgcgcgaagtgctcgatacctgccaggtgattgccgaagcaccgcaaggctccattgccgcctacgtgatctcgatggcgaaaacgccgtccgacgtactggctgtccacctgctgctgaaagaagcgggtatcgggtttgcgatgccggttgctccgctgtttgaaaccctcgatgatctgaacaacgccaacgatgtcatgacccagctgctcaatattgactggtatcgtggcctgattcagggcaaacagatggtgatgattggctattccgactcagcaaaagatgcgggagtgatggcagcttcctgggcgcaatatcaggcacaggatgcattaatcaaaacctgcgaaaaagcgggtattgagctgacgttgttccacggtcgcggcggttccattggtcgcggcggcgcacctgctcatgcggcgctgctgtcacaaccgccaggaagcctgaaaggcggcctgcgcgtaaccgaacagggcgagatgatccgctttaaatatggtctgccagaaatcaccgtcagcagcctgtcgctttataccggggcgattctggaagccaacctgctgccaccgccggagccgaaagagagctggcgtcgcattatggatgaactgtcagtcatctcctgcgatgtctaccgcggctacgtacgtgaaaacaaagattttgtgccttacttccgctccgctacgccggaacaagaactgggcaaactgccgttgggttcacgtccggcgaaacgtcgcccaaccggcggcgtcgagtcactacgcgccattccgtggatcttcgcctggacgcaaaaccgtctgatgctccccgcctggctgggtgcaggtacggcgctgcaaaaagtggtcgaagacggcaaacagagcgagctggaggctatgtgccgcgattggccattcttctcgacgcgtctcggcatgctggagatggtcttcgccaaagcagacctgtggctggcggaatactatgaccaacgcctggtagacaaagcactgtggccgttaggtaaagagttacgcaacctgcaagaagaagacatcaaagtggtgctggcgattgccaacgattcccatctgatggccgatctgccgtggattgcagagtctattcagctacggaatatttacaccgacccgctgaacgtattgcaggccgagttgctgcaccgctcccgccaggcagaaaaagaaggccaggaaccggatcctcgcgtcgaacaagcgttaatggtcactattgccgggattgcggcaggtatgcgtaataccggctaa

SEQ ID NO: 251 - DNA, 1992 bp, Escherichia coli
  CDS (1)...(1992)
atgtcctcacgtaaagagcttgccaatgctattcgtgcgctgagcatggacgcagtacagaaagccaaatccggtcacccgggtgcccctatgggtatggctgacattgccgaagtcctgtggcgtgatttcctgaaacacaacccgcagaatccgtcctgggctgaccgtgaccgcttcgtgctgtccaacggccacggctccatgctgatctacagcctgctgcacctcaccggttacgatctgccgatggaagaactgaaaaacttccgtcagctgcactctaaaactccgggtcacccggaagtgggttacaccgctggtgtggaaaccaccaccggtccgctgggtcagggtattgccaacgcagtcggtatggcgattgcagaaaaaacgctggcggcgcagtttaaccgtccgggccacgacattgtcgaccactacacctacgccttcatgggcgacggctgcatgatggaaggcatctcccacgaagtttgctctctggcgggtacgctgaagctgggtaaactgattgcattctacgatgacaacggtatttctatcgatggtcacgttgaaggctggttcaccgacgacaccgcaatgcgtttcgaagcttacggctggcacgttattcgcgacatcgacggtcatgacgcggcatctatcaaacgcgcagtagaagaagcgcgcgcagtgactgacaaaccttccctgctgatgtgcaaaaccatcatcggtttcggttccccgaacaaagccggtacccacgactcccacggtgcgccgctgggcgacgctgaaattgccctgacccgcgaacaactgggctggaaatatgcgccgttcgaaatcccgtctgaaatctatgctcagtgggatgcgaaagaagcaggccaggcgaaagaatccgcatggaacgagaaattcgctgcttacgcgaaagcttatccgcaggaagccgctgaatttacccgccgtatgaaaggcgaaatgccgtctgacttcgacgctaaagcgaaagagttcatcgctaaactgcaggctaatccggcgaaaatcgccagccgtaaagcgtctcagaatgctatcgaagcgttcggtccgctgttgccggaattcctcggcggttctgctgacctggcgccgtctaacctgaccctgtggtctggttctaaagcaatcaacgaagatgctgcgggtaactacatccactacggtgttcgcgagttcggtatgaccgcgattgctaacggtatctccctgcacggtggcttcctgccgtacacctccaccttcctgatgttcgtggaatacgcacgtaacgccgtacgtatggctgcgctgatgaaacagcgtcaggtgatggtttacacccacgactccatcggtctgggcgaagacgggccgactcaccagccggttgagcaggtcgcttctctgcgcgtaaccccgaacatgtctacatggcgtccgtgtgaccaggttgaatccgcggtcgcgtggaaatacggtgttgagcgtcaggacggcccgaccgcactgatcctctcccgtcagaacctggcgcagcaggaacgaactgaagagcaactggcaaacatcgcgcgcggtggttatgtgctgaaagactgcgccggtcagccggaactgattttcatcgctaccggttcagaagttgaactggctgttgctgcctacgaaaaactgactgccgaaggcgtgaaagcgcgcgtggtgtccatgtcgtctaccgacgcatttgacaagcaggatgctgcttaccgtgaatccgtactgccgaaagcggttactgcacgcgttgctgtagaagcgggtattgctgactactggtacaagtatgttggcctgaacggtgctatcgtcggtatgaccaccttcggtgaatctgctccggcagagctgctgtttgaagagttcggcttcactgttgataacgttgttgcgaaagcaaaagaactgctgtaa

SEQ ID NO: 252 - DNA, 459 bp, Escherichia coli
  CDS (1)...(459)
atgttccggggagcaacgttagtcaatctcgacagcaaagggcgcttatcagtgcctacccgttatcgggaacagctgcttgagaacgctgccggtcaaatggtttgcaccattgacatttatcacccgtgcctgctgctttaccccctgcctgaatgggaaattatcgagcaaaaattatcgcgtctgtcgagcatgaacccggttgagcgccgtgtgcagcgcctactgttaggtcatgccagcgaatgtcagatggatggcgcaggtcgattgttaatcgcgccagtactgcggcaacatgccgggctgacaaaagaagtgatgctggttggacagttcaacaagtttgagctgtgggatgaaacaacctggcatcaacaggtcaaggaagatatcgacgcagagcagttggctaccggagacttatcggagcgactgcaggacttgtctctataa

SEQ ID NO: 253 - DNA, 942 bp, Escherichia coli
  CDS (1)...(942)
atgatggaaaactataaacatactacggtgctgctggatgaagccgttaatggcctcaatatccgtcctgatggcatctacattgatgggacttttggtcgcggtggtcactcacgtctgatcctctcgcagcttggcgaagaggggcgtttgctggcgatcgatcgcgacccgcaggctatcgccgttgcgaagactattgatgatccgcgcttctccatcatccacggacctttctccgcgctgggcgaatacgttgccgagcgcgatcttatcggcaagatcgacggcattctcctcgatcttggcgtctcttcaccgcaacttgatgatgctgaacgtggcttttcctttatgcgcgatggtccgctggacatgcgtatggacccaacccgtgggcagtcagccgctgaatggctacaaaccgcagaagaagccgatatcgcctgggtattgaaaacctatggtgaagagcgttttgccaaacgcattgcccgcgccattgtcgagcgtaaccgcgaacagccgatgacccgcaccaaagaactggcggaagtcgtggctgctgcaacgccggtgaaagataagtttaaacatcccgcgacccgtaccttccaggcggtgcgcatttgggtaaacagtgaactggaggagatagagcaggcgctaaaaagctcgctcaacgtgctggccccgggtgggcggctttcgatcatcagcttccactcgctggaagaccgtattgtgaaacgttttatgcgtgaaaacagccgcggtccgcaagttccggcagggttaccgatgactgaagagcagctcaaaaaactgggtggccgtcagctgcgagcactaggcaagttaatgccgggcgaagaagaggtggctgagaaccctcgtgcccgtagttcagttctgcgtattgcagagaggacgaatgcatga

SEQ ID NO: 254 - DNA, 366 bp, Escherichia coli
  CDS (1)...(366)
atgatcagcagagtgacagaagctctaagcaaagttaaaggatcgatgggaagccacgagcgccatgcattgcctggtgttatcggtgacgatcttttgcgatttgggaagctgccactctgcctgttcatttgcattattttgacggcggtgactgtggtaaccacggcgcaccatacccgtttactgaccgctcagcgcgaacaactggtgctggagcgagatgctttagacattgaatggcgcaacctgatccttgaagagaatgcgctcggcgaccatagccgggtggaaaggatcgccacggaaaagctgcaaatgcagcatgttgatccgtcacaagaaaatatcgtagtgcaaaaataa

SEQ ID NO: 255 - DNA, 1767 bp, Escherichia coli
  CDS (1)...(1767)
atgaaagcagcggcgaaaacgcagaaaccaaaacgtcaggaagaacatgccaactttatcagttggcgttttgcgttgttatgcggctgtattctcctggcgctggcttttctgctcggacgcgtagcgtggttacaagttatctccccggatatgctggtgaaagagggcgacatgcgttctcttcgcgttcagcaagtttccacctcccgcggcatgattactgaccgttctggtcgcccgttagcggtgagcgtgccggtaaaagcgatttgggctgacccgaaagaagtgcatgacgctggcggtatcagcgtcggtgaccgctggaaggcgctggctaacgcgctcaatattccgctggatcagctttcagcccgcattaacgccaacccgaaagggcgctttatttatctggcgcgtcaggtgaaccctgacatggcggactacatcaaaaaactgaaactgccggggattcatctgcgtgaagagtctcgccgttactatccgtccggcgaagtgactgctcacctcatcggctttactaacgtcgatagtcaagggattgagggcgttgagaagagtttcgataaatggcttaccgggcagccgggtgagcgcattgtgcgtaaagaccgctatggtcgcgtaattgaagatatttcttctactgacagccaggcagcgcacaacctggcgctgagtattgatgaacgcctgcaggcgctggtttatcgcgaactgaacaacgcggtggcctttaacaaggctgaatctggtagcgccgtgctggtggatgtcaacaccggtgaagtgctggcgatggctaacagcccgtcatacaaccctaacaatctgagcggcacgccgaaagaggcgatgcgtaaccgtaccatcaccgacgtgtttgaaccgggctcaacggttaaaccgatggtggtaatgaccgcgttgcaacgtggcgtggtgcgggaaaactcggtactcaataccattccttatcgaattaacggccacgaaatcaaagacgtggcacgctacagcgaattaaccctgaccggggtattacagaagtcgagtaacgtcggtgtttccaagctggcgttagcgatgccgtcctcagcgttagtagatacttactcacgttttggactgggaaaagcgaccaatttggggttggtcggagaacgcagtggcttatatcctcaaaaacaacggtggtctgacatagagagggccaccttctctttcggctacgggctaatggtaacaccattacagttagcgcgagtctacgcaactatcggcagctacggcatttatcgcccactgtcgattaccaaagttgaccccccggttcccggtgaacgtgtcttcccggaatccattgtccgcactgtggtgcatatgatggaaagcgtggcgctaccaggcggcggcggcgtgaaggcggcgattaaaggctatcgtatcgccattaaaaccggtaccgcgaaaaaggtcgggccggacggtcgctacatcaataaatatattgcttataccgcaggcgttgcgcctgcgagtcagccgcgcttcgcgctggttgttgttatcaacgatccgcaggcgggtaaatactacggcggcgccgtttccgcgccggtctttggtgccatcatgggcggcgtattgcgtaccatgaacatcgagccggatgcgctgacaacgggcgataaaaatgaatttgtgattaatcaaggcgaggggacaggtggcagatcgtaa

SEQ ID NO: 256 - DNA, 1488 bp, Escherichia coli
  CDS (1)...(1488)
gtggcagatcgtaatttgcgcgaccttcttgctccgtgggtgccagacgcaccttcgcgagcactgcgagagatgacactcgacagccgtgtggctgcggcgggcgatctctttgtagctgtagtaggtcatcaggcggacgggcgtcgatatatcccgcaggcgatagcgcaaggtgtggctgccattattgcagaggcgaaagatgaggcgaccgatggtgaaatccgtgaaatgcacggcgtaccggtcatctatctcagccagctcaacgagcgtttatctgcactggcgggccgcttttaccatgaaccctctgacaatttacgtctcgtgggcgtaacgggcaccaacggcaaaaccacgactacccagctgttggcgcagtggagccaactgcttggcgaaatcagcgcggtaatgggcaccgttggtaacggcctgctggggaaagtgatcccgacagaaaatacaaccggttcggcagtcgatgttcagcatgagctggcggggctggtggatcagggcgcgacgttttgcgcaatggaagtttcctcccacgggctggtacagcaccgtgtggcggcattgaaatttgcggcgtcggtctttaccaacttaagccgcgatcaccttgattatcatggtgatatggaacactacgaagccgcgaaatggctgctttattctgagcatcattgcggtcaggcgattattaacgccgacgatgaagtgggccgccgctggctggcaaaactgccggacgcggttgcggtatcaatggaagatcatattaatccgaactgtcacggacgctggttgaaagcgaccgaagtgaactatcacgacagcggtgcgacgattcgctttagctcaagttggggcgatggcgaaattgaaagccatctgatgggcgcttttaacgtcagcaacctgctgctcgcgctggcgacactgttggcactcggctatccactggctgatctgctgaaaaccgccgcgcgtctgcaaccggtttgcggacgtatggaagtgttcactgcgccaggcaaaccgacggtggtggtggattacgcgcatacgccggatgcactggaaaaagccttacaggcggcgcgtctgcactgtgcgggcaagctgtggtgtgtctttggctgtggtggcgatcgcgataaaggtaagcgtccactgatgggcgcaattgccgaagagtttgctgacgtggcggtggtgacggacgataacccgcgtaccgaagaaccgcgtgccatcatcaacgatattctggcgggaatgttagatgccggacatgccaaagtgatggaaggccgtgctgaagcggtgacttgcgccgttatgcaggctaaagagaatgatgtggtactggtcgcgggcaaaggccatgaagattaccagattgttggcaatcagcgtctggactactccgatcgcgtcacggtggcgcgtctgctgggggtgattgcatga

SEQ ID NO: 257 - DNA, 1359 bp, Escherichia coli
  CDS (1)...(1359)
atgattagcgtaacccttagccaacttaccgacattctcaacggtgaactgcaaggtgcagatatcacccttgatgctgtaaccactgatacccgaaaactgacgccgggctgcctgtttgttgccctgaaaggcgaacgttttgatgcccacgattttgccgaccaggcgaaagctggcggcgcaggcgcactactggttagccgtccgctggacatcgacctgccgcagttaatcgtcaaggatacgcgtctggcgtttggtgaactggctgcatgggttcgccagcaagttccggcgcgcgtggttgctctgacggggtcctccggcaaaacctccgttaaagagatgacggcggcgattttaagccagtgcggcaacacgctttatacggcaggcaatctcaacaacgacatcggtgtaccgatgacgctgttgcgcttaacgccggaatacgattacgcagttattgaacttggcgcgaaccatcagggcgaaatagcctggactgtgagtctgactcgcccggaagctgcgctggtcaacaacctggcagcggcgcatctggaaggttttggctcgcttgcgggtgtcgcgaaagcgaaaggtgaaatctttagcggcctgccggaaaacggtatcgccattatgaacgccgacaacaacgactggctgaactggcagagcgtaattggctcacgcaaagtgtggcgtttctcacccaatgccgccaacagcgatttcaccgccaccaatatccatgtgacctcgcacggtacggaatttaccctacaaaccccaaccggtagcgtcgatgttctgctgccgttgccggggcgtcacaatattgcgaatgcgctggcagccgctgcgctctccatgtccgtgggcgcaacgcttgatgctatcaaagcggggctggcaaatctgaaagctgttccaggccgtctgttccccatccaactggcagaaaaccagttgctgctcgacgactcctacaacgccaatgtcggttcaatgactgcagcagtccaggtactggctgaaatgccgggctaccgcgtgctggtggtgggcgatatggcggaactgggcgctgaaagcgaagcctgccatgtacaggtgggcgaggcggcaaaagctgctggtattgaccgcgtgttaagcgtgggtaaacaaagccatgctatcagcaccgccagcggcgttggcgaacattttgctgataaaactgcgttaattacgcgtcttaaattactgattgctgagcaacaggtaattacgattttagttaagggttcacgtagtgccgccatggaagaggtagtacgcgctttacaggagaatgggacatgttag

SEQ ID NO: 258 - DNA, 1083 bp, Escherichia coli
  CDS (1)...(1083)
atgttagtttggctggccgaacatttggtcaaatattattccggctttaacgtcttttcctatctgacgtttcgcgccatcgtcagcctgctgaccgcgctgttcatctcattgtggatgggcccgcgtatgattgctcatttgcaaaaactttcctttggtcaggtggtgcgtaacgacggtcctgaatcacacttcagcaagcgcggtacgccgaccatgggcgggattatgatcctgacggcgattgtgatctccgtactgctgtgggcttacccgtccaatccgtacgtctggtgcgtgttggtggtgctggtaggttacggtgttattggctttgttgatgattatcgcaaagtggtgcgtaaagacaccaaagggttgatcgctcgttggaagtatttctggatgtcggtcattgcgctgggtgtcgccttcgccctgtaccttgccggcaaagacacgcccgcaacgcagctggtggtcccattctttaaagatgtgatgccgcagctggggctgttctacattctgctggcttacttcgtcattgtgggtactggcaacgcggtaaacctgaccgatggtctcgacggcctggcaattatgccgaccgtatttgtcgccggtggttttgcgctggtggcgtgggcgaccggcaatatgaactttgccagctacttgcatataccgtatctgcgacacgccggggaactggttattgtctgtaccgcgatagtcggggcaggactgggcttcctgtggtttaacacctatccggcgcaggtctttatgggcgatgtaggttcgctggcgttaggtggtgcgttaggcattatcgccgtactgctacgtcaggaattcctgctggtgattatggggggcgtgttcgtggtagaaacgctttctgtcatcctgcaggtcggctcctttaaactgcgcggacaacgtattttccgcatggcaccgattcatcaccactatgaactgaaaggctggccggaaccgcgcgtcattgtgcgtttctggattatttcgctgatgctggttctgattggtctggcaacgctgaaggtacgttaa

SEQ ID NO: 259 - DNA, 1317 bp, Escherichia coli
  CDS (1)...(1317)
atggctgattatcagggtaaaaatgtcgtcattatcggcctgggcctcaccgggctttcctgcgtggactttttcctcgctcgcggtgtgacgccgcgcgttatggatacgcgtatgacaccgcctggcctggataaattacccgaagccgtagaacgccacacgggcagtctgaatgatgaatggctgatggcggcagatctgattgtcgccagtcccggtattgcactggcgcatccatccttaagcgctgccgctgatgccggaatcgaaatcgttggcgatatcgagctgttctgtcgcgaagcacaagcaccgattgtggcgattaccggttctaacggcaaaagcacggtcaccacgctagtgggtgaaatggcgaaagcggcgggggttaacgttggtgtgggtggcaatattggcctgcctgcgttgatgctactggatgatgagtgtgaactgtacgtgctggaactgtcgagcttccagctggaaaccacctccagcttacaggcggtagcagcgaccattctgaacgtgactgaagatcatatggatcgctatccgtttggtttacaacagtatcgtgcagcaaaactgcgcatttacgaaaacgcgaaagtttgcgtggttaatgctgatgatgccttaacaatgccgattcgcggtgcggatgaacgctgcgtcagctttggcgtcaacatgggtgactatcacctgaatcatcagcagggcgaaacctggctgcgggttaaaggcgagaaagtgctgaatgtgaaagagatgaaactttccgggcagcataactacaccaatgcgctggcggcgctggcgctggcagatgctgcagggttaccgcgtgccagcagcctgaaagcgttaaccacattcactggtctgccgcatcgctttgaagttgtgctggagcataacggcgtacgttggattaacgattcgaaagcgaccaacgtcggcagtacggaagcggcgctgaatggcctgcacgtagacggcacactgcatttgttgctgggtggcgatggtaaatcggcggactttagcccactggcgcgttacctgaatggcgataacgtacgtctgtattgtttcggtcgtgacggcgcgcagctggcggcgctacgcccggaagtggcagaacaaaccgaaactatggaacaggcgatgcgcttgctggctccgcgtgttcagccgggcgatatggttctgctctccccagcctgtgccagccttgatcagttcaagaactttgaacaacgaggcaatgagtttgcccgtctggcgaaggagttaggttga

SEQ ID NO: 260 - DNA, 1245 bp, Escherichia coli
  CDS (1)...(1245)
atgcgtttatctctccctcgcctgaaaatgccgcgcctgccaggattcagtatcctggtctggatctccacggcgctaaagggctgggtgatgggctcgcgggaaaaagataccgacagcctgatcatgtacgatcgcaccttactgtggctgaccttcggcctcgcggcgattggctttatcatggtgacctcggcgtcaatgcccatagggcaacgcttaaccaacgatccgttcttcttcgcgaagcgtgatggtgtctatctgattttggcgtttattctggcgatcattacgctgcgtctgccgatggagttctggcaacgctacagtgccacgatgctgctcggatctatcatcctgctgatgatcgtcctggtagtgggtagctcggttaaaggggcatcgcgttggatcgatctcggtttgctgcgtatccagcctgcggagctgacaaaactgtcgctgttttgctatatcgccaactatctggtgcgtaaaggcgacgaagtacgtaataacctgcgcggcttcctgaaaccgatgggcgtgattctggtgttggcagtgttactgctggcacagccagaccttggtacggtggtggtgttgtttgtgactacgctggcgatgttgttcctggcgggagcgaaattgtggcagttcattgccattatcggtatgggcatttcagcggttgtgttgctgatactcgccgaaccgtaccgtatccgccgtgttaccgcattctggaacccgtgggaagatccctttggcagcggctatcagttaacgcaatcgctgatggcgtttggtcgcggcgaactttgggggcaaggtttaggtaactcggtacaaaaactggagtatctgccggaagcgcacactgactttattttcgccattatcggcgaagaactggggtatgtcggtgtggtgctggcacttttaatggtattcttcgtcgcttttcgcgcgatgtcgattggccgtaaagcattagaaattgaccaccgtttttccggttttctcgcctgttctattggcatctggtttagcttccaggcgctggttaacgtaggcgcggcggcggggatgttaccgaccaaaggtctgacattgccgctgatcagttacggtggttcgagcttactgattatgtcgacagccatcatgatgctgttgcgtattgattatgaaacgcgtctggagaaagcgcaggcgtttgtacgaggttcacgatga

SEQ ID NO: 261 - DNA, 1068 bp, Escherichia coli
  CDS (1)...(1068)
atgagtggtcaaggaaagcgattaatggtgatggcaggcggaaccggtggacatgtattcccgggactggcggttgcgcaccatctaatggctcagggttggcaagttcgctggctggggactgccgaccgtatggaagcggacttagtgccaaaacatggcatcgaaattgatttcattcgtatctctggtctgcgtggaaaaggtataaaagcactgatagctgccccgctgcgtatcttcaacgcctggcgtcaggcgcgggcgattatgaaagcgtacaaacctgacgtggtgctcggtatgggaggctacgtgtcaggtccaggtggtctggccgcgtggtcgttaggcattccggttgtacttcatgaacaaaacggtattgcgggcttaaccaataaatggctggcgaagattgccaccaaagtgatgcaggcgtttccaggtgctttccctaatgcggaagtagtgggtaacccggtgcgtaccgatgtgttggcgctgccgttgccgcagcaacgtttggctggacgtgaaggtccggttcgtgtgctggtagtgggtggttctcagggcgcacgcattcttaaccagacaatgccgcaggttgctgcgaaactgggtgattcagtcactatctggcatcagagcggcaaaggttcgcaacaatccgttgaacaggcgtatgccgaagcggggcaaccgcagcataaagtgacggaatttattgatgatatggcggcggcgtatgcgtgggcggatgtcgtcgtttgccgctccggtgcgttaacggtgagtgaaatcgccgcggcaggactaccggcgttgtttgtgccgtttcaacataaagaccgccagcaatactggaatgcgctaccgctggaaaaagcgggcgcagccaaaattatcgagcagccacagcttagcgtggatgctgtcgccaacaccctggccgggtggtcgcgagaaaccttattaaccatggcagaacgcgcccgcgctgcatccattccggatgccaccgagcgagtggcaaatgaagtgagccgggttgcccgggcgtaa

SEQ ID NO: 262 - DNA, 1476 bp, Escherichia coli
  CDS (1)...(1476)
atgaatacacaacaattggcaaaactgcgttccatcgtgcccgaaatgcgtcgcgttcggcacatacattttgtcggcattggtggtgccggtatgggcggtattgccgaagttctggccaatgaaggttatcagatcagtggttccgatttagcgccaaatccggtcacgcagcagttaatgaatctgggtgcgacgatttatttcaaccatcgcccggaaaacgtacgtgatgccagcgtggtcgttgtttccagcgcgatttctgccgataacccggaaattgtcgccgctcatgaagcgcgtattccggtgatccgtcgtgccgaaatgctggctgagttaatgcgttttcgtcatggcatcgccattgccggaacgcacggcaaaacgacaaccaccgcgatggtttccagcatctacgcagaagcggggctcgacccaaccttcgttaacggcgggctggtaaaagcggcgggggttcatgcgcgtttggggcatggtcggtacctgattgccgaagcagatgagagtgatgcatcgttcctgcatctgcaaccgatggtggcgattgtcaccaatatcgaagccgaccacatggatacctaccagggcgactttgagaatttaaaacagacttttattaattttctgcacaacctgccgttttacggtcgtgcggtgatgtgtgttgatgatccggtgatccgcgaattgttaccgcgagtggggcgtcagaccacgacttacggcttcagcgaagatgccgacgtgcgtgtagaagattatcagcagattggcccgcaggggcactttacgctgctgcgccaggacaaagagccgatgcgcgtcaccctgaatgcgccaggtcgtcataacgcgctgaacgccgcagctgcggttgcggttgctacggaagagggcattgacgacgaggctattttgcgggcgcttgaaagcttccaggggactggtcgccgttttgatttcctcggtgaattcccgctggagccagtgaatggtaaaagcggtacggcaatgctggtcgatgactacggccaccacccgacggaagtggacgccaccattaaagcggcgcgcgcaggctggccggataaaaacctggtaatgctgtttcagccgcaccgttttacccgtacgcgcgacctgtatgatgatttcgccaatgtgctgacgcaggttgataccctgttgatgctggaagtgtatccggctggcgaagcgccaattccgggagcggacagccgttcgctgtgtcgcacaattcgtggacgtgggaaaattgatcccattctggtgccggatccggcgcgggtagccgagatgctggcaccggtattaaccggtaacgacctgattctcgttcagggggctggtaatattggaaaaattgcccgttctttagctgaaatcaaactgaagccgcaaactccggaggaagaacaacatgactga

SEQ ID NO: 263 - DNA, 921 bp, Escherichia coli
  CDS (1)...(921)
atgactgataaaatcgcggtcctgttgggtgggacctccgctgagcgggaagtttctctgaattctggcgcagcggtgttagccggactgcgtgaaggcggtattgacgcgtatcctgtcgacccgaaagaagtcgacgtgacgcaactgaagtcgatgggctttcagaaagtgtttatcgcgctacacggtcgcggcggtgaagatggtacgctgcaggggatgctcgagctgatgggcttgccttataccggaagcggagtgatggcatctgcgctttcaatggataaactacgcagcaaacttctatggcaaggtgccggtttaccggtcgcgccgtgggtagcgttaacccgcgcagagtttgaaaaaggcctgagcgataagcagttagcagaaatttctgctctgggtttgccggttatcgttaagccgagccgcgaaggttccagtgtgggaatgtcaaaagtagtagcagaaaatgctctacaagatgcattaagattggcatttcagcacgatgaagaagtattgattgaaaaatggctaagtgggccggagttcacggttgcgatactcggtgaagaaattttaccgtcaatacgtattcaaccgtccggaaccttctatgattatgaggcgaagtatctctctgatgagacacagtatttctgccccgcaggtctggaagcgtcacaagaggccaatttgcaggcattagtgctgaaagcatggacgacgttaggttgcaaaggatggggacgtattgacgttatgctggacagcgatggacagttttatctgctggaagccaatacctcaccgggtatgaccagccacagcctggtgccgatggcggcacgtcaggcaggtatgagcttctcgcagttggtagtacgaattctggaactggcggactaa

SEQ ID NO: 264 - DNA, 606 bp, Escherichia coli
  CDS (1)...(606)
atggcgctgcatgacgaaaacgtcgtctggcatagccatccggtcactgtgcaacaacgcgagctacaccacggtcatcgtggtgtagtgctgtggtttaccggcctctccgggtccggtaaatcaacggtcgccggggcgctggaggaggcgttacataaactcggcgtcagtacgtatctgctggatggcgacaatgttcgccacggattatgcagcgatctcggttttagcgatgccgatcgtaaagagaatatccgtcgcgtcggtgaagtggcgaatttgatggttgaagccggactggtggtgctgaccgcatttatctcgccacaccgcgccgaacgccagatggttcgcgaacgcgtaggagaagggcgctttatcgaagtgtttgtcgatacgccgctggcgatttgcgaagcccgcgatcccaaaggcttatataagaaagcgcgtgccggtgaactgcgcaactttacgggaatagattccgtttacgaagcgcctgaatcggcagaaattcatctcaatggtgaacaattagtaacaaatttggtacagcaattattagatctgttgagacagaacgatattatcagatcctga

SEQ ID NO: 265 - DNA, 1428 bp, Escherichia coli
  CDS (1)...(1428)
atgaacaccgcacttgcacaacaaatcgccaatgaaggcggcgtcgaagcctggatgattgcgcaacaacataaaagcctgctgcgttttctgacctgtggtagcgtcgatgacggcaaaagtactctgattggtcgtctgctgcacgatacccgccaaatctacgaagatcagctctcatcgctgcataacgacagtaagcgtcacggcacccagggcgaaaagctggatctggctctgctggtggacggcctgcaagctgagcgcgaacagggcatcaccattgacgtggcctaccgctatttctctaccgagaagcgtaaatttattatcgccgacaccccagggcacgagcagtacacccgcaatatggcgactggcgcatcgacatgtgaactggcgatcttactgatcgatgcccgtaaaggcgtgctcgatcaaacccgtcgtcacagttttatctccacactgttggggatcaaacatctggtcgtggcgatcaacaaaatggatctggtggattacagtgaagagacgttcacccgtattcgtgaagattatttgacctttgccgggcagctgccgggtaatctggatatccgctttgtgccgctctctgcactggaaggcgacaacgtggcatcgcaaagtgaaagtatgccgtggtacagcggtccgacactgctcgaagtgctggaaaccgtggagatccagcgagtggtggatgctcagccaatgcgcttcccggtgcagtacgttaatcgcccgaatctcgattttcgtggttacgccggaacgctggcatccggtcgcgtggaagtcgggcaacgtgtcaaagtgctgccctctggtgtggaatcaaacgtcgcgcggatcgtgacttttgatggtgatcgcgaagaagcctttgccggagaagcgatcaccctggtgctgacggatgagatcgacatcagccgtggcgatctgctgctggcggcagacgaagcgttaccggcggtgcagagcgcgtcggtggatgtggtatggatggcggaacagccgctttctccagggcagagttacgacatcaaaattgccggtaagaagacgcgcgcgcgtgttgatggcattcgctatcaggttgatattaataaccttacccagcgtgaagttgaaaacctgccactgaatgggatcggcctcgtggatctcacttttgacgagccgctggtgttagatcgttatcaacaaaatccggtgacgggtgggctgatttttatcgatcgcctgagcaatgtgaccgtgggtgccggtatggtgcacgagccagttagccaggcaactgctgcgccatctgaattcagtgcattcgaactggaattgaatgctctggttcgtcgccactttccgcactggggcgcgcgcgatttgctgggggataaataa

SEQ ID NO: 266 - DNA, 384 bp, Escherichia coli
  CDS (1)...(384)
atgcgccatcgtaagagtggtcgtcaactgaaccgcaacagcagccatcgccaggctatgttccgcaatatggcaggttcactggttcgtcatgaaatcatcaagacgactctgcctaaagcgaaagagctgcgccgcgtagttgagccgctgattactcttgccaagactgatagcgttgctaatcgtcgtctggcattcgcccgtactcgtgataacgagatcgtggcaaaactgtttaacgaactgggcccgcgtttcgcgagccgtgccggtggttacactcgtattctgaagtgtggcttccgtgcaggcgacaacgcgccgatggcttacatcgagctggttgatcgttcagagaaagcagaagctgctgcagagtaa

SEQ ID NO: 267 - DNA, 990 bp, Escherichia coli
  CDS (1)...(990)
atgcagggttctgtgacagagtttctaaaaccgcgcctggttgatatcgagcaagtgagttcgacgcacgccaaggtgacccttgagcctttagagcgtggctttggccatactctgggtaacgcactgcgccgtattctgctctcatcgatgccgggttgcgcggtgaccgaggttgagattgatggtgtactacatgagtacagcaccaaagaaggcgttcaggaagatatcctggaaatcctgctcaacctgaaagggctggcggtgagagttcagggcaaagatgaagttattcttaccttgaataaatctggcattggccctgtgactgcagccgatatcacccacgacggtgatgtcgaaatcgtcaagccgcagcacgtgatctgccacctgaccgatgagaacgcgtctattagcatgcgtatcaaagttcagcgcggtcgtggttatgtgccggcttctacccgaattcattcggaagaagatgagcgcccaatcggccgtctgctggtcgacgcatgctacagccctgtggagcgtattgcctacaatgttgaagcagcgcgtgtagaacagcgtaccgacctggacaagctggtcatcgaaatggaaaccaacggcacaatcgatcctgaagaggcgattcgtcgtgcggcaaccattctggctgaacaactggaagctttcgttgacttacgtgatgtacgtcagcctgaagtgaaagaagagaaaccagagttcgatccgatcctgctgcgccctgttgacgatctggaattgactgtccgctctgctaactgccttaaagcagaagctatccactatatcggtgatctggtacagcgtaccgaggttgagctccttaaaacgcctaaccttggtaaaaaatctcttactgagattaaagacgtgctggcttcccgtggactgtctctgggcatgcgcctggaaaactggccaccggcaagcatcgctgacgagtaa

SEQ ID NO: 268 - DNA, 621 bp, Escherichia coli
  CDS (1)...(621)
atggcaagatatttgggtcctaagctcaagctgagccgtcgtgagggcaccgacttattccttaagtctggcgttcgcgcgatcgataccaagtgtaaaattgaacaagctcctggccagcacggtgcgcgtaaaccgcgtctgtctgactatggtgtgcagttgcgtgaaaagcaaaaagttcgccgtatctatggtgtgctggagcgtcagttccgtaactactacaaagaagcagcacgtctgaaaggcaacaccggtgaaaacctgttggctctgctggaaggtcgtctggacaacgttgtataccgtatgggcttcggtgccactcgtgcagaagcacgtcagctggttagccataaagcaattatggtaaacggtcgtgttgttaacatcgcttcttatcaggttagtccgaatgacgttgtaagcattcgtgagaaagcgaagaagcagtctcgcgtgaaagccgctctggagctggctgagcagcgtgaaaagccaacctggctggaagttgatgctggcaagatggaaggtacgtttaagcgtaagccggagcgttctgatctgtctgcggacattaacgaacacctgatcgtcgagctttactccaagtaa

SEQ ID NO: 269 - DNA, 390 bp, Escherichia coli
  CDS (1)...(390)
atggcaaaggcaccaattcgtgcacgtaaacgtgtaagaaaacaagtctctgacggcgtggctcatatccatgcttctttcaacaacaccatcgtgactatcactgatcgtcagggtaacgcgttgggttgggcaacagccggtggttccggtttccgtggttctcgcaaatccactccgtttgcagctcaggttgcagcagagcgttgcgctgacgccgtgaaagaatacggcatcaagaatctggaagttatggttaaaggtccgggtccaggccgcgaatctactattcgtgctctgaacgccgcaggtttccgcatcactaacattactgatgtgactccgatccctcataacggttgtcgtccgccgaaaaaacgtcgcgtataa

SEQ ID NO: 270 - DNA, 357 bp, Escherichia coli
  CDS (1)...(357)
gtggcccgtatagcaggcattaacattcctgatcataagcatgccgtaatcgcattaacttcgatttatggcgtcggcaagacccgttctaaagccatcctggctgcagcgggtatcgctgaagatgttaagatcagtgagctgtctgaaggacaaatcgacacgctgcgtgacgaagttgccaaatttgtcgttgaaggtgatctgcgccgtgaaatcagcatgagcatcaagcgcctgatggatcttggttgctatcgcggtttgcgtcatcgtcgtggtctcccggttcgcggtcagcgtaccaagaccaacgcacgtacccgtaagggtccgcgcaaaccgatcaagaaataa

SEQ ID NO: 271 - DNA, 1383 bp, Escherichia coli
  CDS (1)...(1383)
atgacgcaattaaccatgaaagacaaaattggctacgggctgggagacaccgcctgcggcttcgtctggcaggccacgatgttcctgctggcctatttctacaccgacgtcttcggcctgtcggcggggattatgggcacgctgtttttggtctcccgcgtgctcgacgccgtcaccgacccgctgatggggctgctggtagaccgcacccgcacgcggcacggccagttccgcccgttcctgctgtggggggccatcccgttcggcatcgtctgcgtgctgaccttctacacgccggacttctccgcacagggcaagatcatctacgcctgcgtgacctacattctcctgaccctggtctacaccttcgttaacgtgccgtactgcgccatgccgggcgtcatcaccgccgacccgaaagagcgtcacgccctgcagtcctggcgcttcttcctggcggcggcgggctcgctcgctatcagcggcatcgcgctgccgctggtgagcatcatcggcaaaggggacgagcaggtgggctacttcggcgccatgtgcgtgctggggctgagcggcgtggtgctgctctacgtctgcttcttcacgaccaaagagcgctacacctttgaggtgcagccgggctcgtcggtggcgaaagaccttaagctgctgctgggcaacagccagtggcgcatcatgtgcgcgttcaagatgatggcgacctgctccaacgtggtgcgcggcggggcgacgctctacttcgtgaaatacgtgatggatcacccggagttggcgacccagtttttactttacggcagcctcgccaccatgttcggctcgctttgctcctcacgcctgctgggccgcttcgaccgcgtcaccgccttcaagtggatcatcgtcgcctactcgctgatcagcctgctgattttcgtcaccccggcggagcacatcgcgctcatttttgccctcaacatcctgttcctgttcgtctttaataccaccacgccgctgcagtggctgatggcttctgacgtggtggactacgaggagagccgcagcggtcgccgcctcgacgggctggtgttctccacctacctgttcagcctgaagattggcctggcgattggcggggcggtggtgggctggatcctggcgtacgtcaactattccgccagcagcagcgtgcagccggttgaggtgctcaccaccatcaaaattctgttctgcgtggtgccggtggtgctctacgcgggcatgttcatcatgctgtcgctctacaagctcaccgatgcccgcgtggaggccatcagccggcagctgattaagcaccgcgcggcgcagggcgaggccgttcccgacgccgcgacagccgcatcccattaa

SEQ ID NO: 272 - DNA, 1611 bp, Escherichia coli
  CDS (1)...(1611)
atggaaatcactaacccgatactcaccggcttcaacccggacccgtccctgtgccgccagggcgaggactactacatcgccacctcgaccttcgagtggttcccgggcgtgcgcatctaccactcccgtgacctgaaaaactggtcgctggtcagcaccccgttggaccgcgtgtcgatgctggacatgaagggcaacccggactccggcggcatctgggcgccgtgcctgagctacgccgacggtaaattctggctgctctacaccgacgtgaagattgtcgactcgccgtggaaaaacggccgcaacttcctcgtcaccgcgccctccatcgaggggccatggagcgagccaatcccgatgggcaacggcgggtttgacccgtccctgttccacgacgacgatggccgcaaatactatatctaccgcccgtgggggccgcgccaccacagcaacccgcacaacaccatcgtgttacaggcgtttgacccgcagaccggcacgctctcgcccgagcgcaaaacgctgtttaccggcacgccgctctgctacaccgaaggcgcgcacctgtatcgccacgcgggatggtactacctgatggccgccgagggcggcaccagctacgagcacgccgtcgtggtgctgcgttccaaaaatatcgacgggccgtacgagctgcacccggacgtaacgatgatgaccagctggcacctgccggagaacccgctgcagaagagcggccacggctcgctgctgcagacgcatacgggtgaatggtacatggcctacctcaccagccgcccgctgcgcctgcccggcgtgccgctgctggcctccggcggacgcggctactgcccgctggggcgcgagaccggcatcgcccgcattgaatggcgcgacggctggccgtacgtggaaggcggcaagcacgcgcagctgaccgtgaaaggcccgcaagtagccgagcagcctgcagccgttccgggcaactggcgggacgatttcgacgccagttcgcttgacccggagctgcagaccctgcgcattccgttcgacgacaccctcggctcgctcaccgcgcgcccgggcttcttacggctctatggcaacgactcgctcaattcgaccttcacccaatcgaccgtggcgcgccgctggcagcacttcgccttccgggcagaaacgcggatggagttctcgccggtgcacttccagcagagcgcggggctgacctgctactacaacagcaaaaactggagctactgctttgtggactacgaggagggacagggtagaaccatcaaagttatccagctcgaccacaacgtgccgtcgtggccgctgcacgagcagcccattccggtgccggaacatgcggagagcgtctggctgcgggtggacgtggatacgctggtctaccgctacagctactcgtttgatggcgagacgtggcacaccgtgccggtgacgtatgaggcgtggaagctgtcggacgactacatcggcgggcgcggcttcttcaccggcgcgtttgtgggcctgcactgcgaggacatcagcggcgacggctgctacgcggacttcgactacttcacctacgagccggtctaa

SEQ ID NO: 273 - DNA, 978 bp, Escherichia coli
  CDS (1)...(978)
ttgcatatgaaaaaaataatctttgcttttattatattatttgtgtttttactccctatgattattttttaccaaccctgggtcaatgcattaccgtcaacgccccgacacgcaagtcctgagcaattagaaaaaacagttcgttatcttacacaaactgtgcatccacgtagtgccgacaatattgataatctgaataggtccgcagaatatataaaagaggtctttgtcagtagcggtgccagagttacctcgcaggacgtccccattacgggtggcccctacaaaaacattgttgctgattatggtcctgccgatggaccgctgattattattggtgcgcattatgactctgccagcagttatgaaaacgatcaattgacctatacgccgggcgcggatgataacgccagcggtgtggcaggattactcgaactggcacgtttgttacatcagcaagtaccgaaaacaggcgtgcagctggtcgcctatgcgtcggaagaaccgcccttctttcgtagcgatgaaatggggagcgcggtgcatgcagcttcgcttgagcgtccagtgaaattaatgatagcactggagatgattggctattacgactctgcgcctggaagccagaattacccttacccggcaatgtcctggctttatcccgatcggggagactttattgccgtggtcggcagaatacaggatatcaacgccgttcgtcaggtaaaagcggcattgttgtcatctcaggatttatctgtttattctatgaataccccagggtttattcccggtattgatttctctgaccacctgaattattggcaacacgatattcccgccataatgattactgacaccgctttttatcgtaataaacaataccacttgcccggtgataccgcagacagattgaattatcagaaaatggctcaggtagtggatggtgttataactttgttatacaacagtaaataa

SEQ ID NO: 274 - DNA, 963 bp, Escherichia coli
  CDS (1)...(963)
gtgatgatcaaaacgcgtttttctcgctggctaacgttttttacgttcgccgctgccgtggcgctggcgctaccggcaaaagccaacacctggccgctgccgccagcgggcagtcgtctggttggcgaaaacaaatttcatgtggtggaaaatgacggtggttctctggaagccatcgccaaaaaatacaacgtcggctttctcgctctgttacaggctaaccccggcgttgatccttacgtaccgcgcgcgggcagcgtgttaacgatcccgttgcaaaccctacttccagatgcgccgcgcgaaggcattgtgatcaacattgcggagctgcgtctctattactacccgccgggtaaaaattcggtaaccgtgtatccaataggtattggtcagttaggtggtgacacgctgacaccgacaatggtgaccaccgtttcagacaaacgtgcaaacccaacctggacgccaacggcaaacatccgcgcccgttataaagcacagggaattgagttgcctgcggtagtgccggctggactggataacccaatgggccatcatgcgattcgtctggcggcctatggcggcgtttatttgcttcatggtacgaacgccgatttcggcattggcatgcgggtaagttctggctgtattcgtctgcgggatgacgatatcaaaacactctttagccaggtcaccccaggcaccaaagtgaatatcatcaacactccgataaaagtctctgccgaaccaaacggtgcgcgtctggttgaagtacatcagccgctgtcagagaagattgatgacgatccgcagctgctgccaattacgctgaatagcgcaatgcaatcatttaaagatgcagcacaaactgacgctgaagtgatgcaacatgtgatggatgtccgttccgggatgccggtggatgtccgccgtcatcaagtgagcccacaaacgctgtaa

SEQ ID NO: 275 - DNA, 1485 bp, Escherichia coli
  CDS (1)...(1485)
gtggtcgcaatccatcttttgccggttagttacaattctgcgacatccaccgtgaatatcagtgctagaatcatacccctgttgattattcaccaaagatataaaattcctatgccaaaagttcaggccgacggcctgccattgccccagcgatacggtgcgatattaaccattgtgattggtatttcgatggccgtccttgacggcgcaatcgccaacgtcgccctgccaacaatcgccacggaccttcatgccacgccagccagttccatctgggtagtgaacgcctatcaaatcgccattgtcatctccctgctctcgttttcgtttctgggcgatatgtttggctatcgacgtatttataaatgcggtctggtcgtttttctgttgtcttcactgttctgcgccctttctgattcgctgcaaatgctcacccttgcgcgtgtcatacaaggtttcggcggtgcagcgttgatgagcgttaataccgcacttatccgcctgatctatccacaacgttttctgggtagagggatgggcataaactcgtttattgttgccgtctcttctgctgccgggccgacaattgctgcagcaatcctctccatcgcatcctggaaatggttatttttaatcaacgtaccgttaggtattatcgccctgcttctggcgatgcgttttctgccacccaatggttctcgcgccagtaaaccccgtttcgacctgcccagcgccgtgatgaacgcgttaaccttcggcctgcttatcactgcgttgagtggtttcgctcaggggcaatcgctgacgttaattgctgcggaactggtggtaatggttgttgttggtattttctttattcgccgccagctttctcttcccgtaccgctgctaccggtggatttactgcgtatcccgctgttttcactttctatttgcacatctgtttgctctttctgcgcacaaatgctggcaatggtttccctgcccttttacctgcaaaccgtgctcgggcgtagtgaagtcgaaacaggtttacttctgacaccgtggccgttagcaacgatggtgatggctccgctggcaggctatttgattgaacgcgtacatgcaggattgctgggggctttagggttgttcatcatggctgcggggcttttttccctggttctgctgcccgcgtcacctgcggatatcaatattatctggccgatgatcttatgtggtgctggatttggcttattccagtcacccaataaccacaccattattacctccgcgcctcgcgaacgtagcggtggagccagtggcatgttaggaacggctcgtctactgggtcagagtagcggcgcggcgctggtggcgctgatgctaaatcagtttggagataatggtacacacgtctcgctgatggctgcggctattctggcagtgattgctgcctgtgtcagtggtttacgtatcactcagccacgatccagggcataa

SEQ ID NO: 276 - DNA, 1434 bp, Escherichia coli
  CDS (1)...(1434)
atgaaagtaacgctgccagagtttgaacgtgcaggagtgatggtggttggtgatgtgatgctggatcgttactggtacggccccaccagtcgtatctcgccggaagcgccggtgcccgtggttaaagtgaataccatcgaagaacgtccgggcggcgcggctaacgtggcgatgaatatcgcttctctcggtgctaatgcacgcctggtcgggttgacgggcattgacgatgcagcgcgcgcgctgagtaaatctctggccgacgtcaacgtcaaatgcgacttcgtttctgtaccgacgcatccgaccattaccaaattacgggtactttcccgcaaccaacagctgatccgtctggattttgaagaaggtttcgaaggtgttgatccgcagccgctgcacgagcggattaatcaggcgctgagttcgattggcgcgctggtgctttctgactacgccaaaggtgcgctggcaagcgtacagcagatgatccaactggcgcgtaaagcgggtgttccggtgctgattgatccaaaaggtaccgattttgagcgctaccgcggcgctacgctgttaacgccgaatctctcggaatttgaagctgttgtcggtaaatgtaagaccgaagaagagattgttgagcgcggcatgaaactgattgccgattacgaactctcggctctgttagtgacccgttccgaacagggtatgtcgctgctgcaaccgggtaaagcgccgctgcatatgccaacccaagcgcaggaagtgtatgacgttaccggtgcgggcgacacggtgattggcgtcctggcggcaacgctggcagcgggtaattcgctggaagaagcctgcttctttgccaatgcggcggctggcgtggtggtcggcaaactgggaacctccacggtttcgccgatcgagctggaaaatgctgtacgtggacgtgcagatacaggctttggcgtgatgaccgaagaggaactgaagctggccgtagcggcagcgcgtaaacgtggtgaaaaagtggtgatgaccaacggtgtctttgacatcctgcacgccgggcacgtctcttatctggcaaatgcccgcaagctgggtgaccgcttgattgttgccgtcaacagcgatgcctccaccaaacggctgaaaggggattcccgcccggtaaacccactcgaacagcgtatgattgtgctgggcgcactggaagcggtcgactgggtagtgtcgtttgaagaggacacgccgcagcgcttgatcgccgggatcttgccagatctgctggtgaaaggcggcgactataaaccagaagagattgccgggagtaaagaagtctgggccaacggtggcgaagtgttggtgctcaactttgaagacggttgctcgacgaccaacatcatcaagaagatccaacaggataaaaaaggctaa

SEQ ID NO: 277 - DNA, 2841 bp, Escherichia coli
  CDS (1)...(2841)
atgaagccgctctcttcaccgttacagcagtactggcagaccgttgttgagcggctgccagagcctttagccgaggaatcacttagcgcacaggcgaagtcagtacttacttttagtgattttgtgcaggacagcgtgattgcgcatccagagtggctgacggaactggaaagccaaccgccgcaggccgacgaatggcagcattacgcggcatggttgcaggaggcgctctgtaatgtgagtgacgaagccgggttaatgcgcgagctgcggctattccggcggcgcattatggtgcgcatcgcctgggcgcaaacgctggcactggttactgaagagagcatattgcagcagctcagctatctggcggagacgctgattgttgcggcgcgtgactggctgtatgacgcctgctgccgcgagtggggaacgccgtgcaatgcgcagggcgaagcgcaaccgctgctgattttaggcatgggtaagctgggcggtggggagctgaatttctcctctgatatcgatctgatttttgcctggccggaacatggttgtacgcagggtggacgccgggaactggataacgcgcagttttttacccgcatggggcagcggctgattaaagtgctggatcaaccaacgcaggatggcttcgtctatcgcgtggatatgcggctgcgtccgtttggcgaaagtggcccgctggtgctgagctttgccgcgttggaagattattaccaggagcaggggcgcgactgggagcgttacgcgatggtcaaggcgcggattatgggcgatagcgaaggcgtctatgctaacgagttgcgtgcgatgctgcgcccgtttgttttccgtcgttacatcgatttcagcgtgattcagtcgctgcgcaacatgaaagggatgattgcccgtgaagtgcgtcgacgtggtttgaccgacaatatcaaactcggcgcaggcggcattcgcgaaattgaatttatcgttcaggtgttccagctcattcgcggcggacgcgaaccgtcgctgcaatcgcgctctttactgccaacgctcagcgccattgccgagctgcatctgctttctgaaaacgatgctgaacaattgcgagtggcgtatctgttcctgcggcgtctggaaaacctgctgcaaagcattaacgacgaacaaacccagacgcttccttctgatgagcttaatcgtgcgcggctggcgtgggcgatggactttgctgactggccgcaactgaccggggcgctgaccgcacatatgaccaatgtgcgccgggtgtttaatgaattgattggcgacgatgaaagtgaaactcaggaagagtcgctgtcggaacagtggcgtgagctgtggcaggatgcgttgcaggaagatgacactacgccagtgctggcgcatcttagcgaggatgatcgcaaacaggtgctaacgctgattgccgatttccgcaaagagctggataagcgcaccatcgggccgcgaggacgtcaggtgctcgaccatctgatgccgcatctgctaagtgatgtctgtgcgcgtgaagacgctgccgttacgctgtcgcgcattaccgccttgctggtggggattgttacccgcaccacctatttagaattgctcagtgaattccccgcggcgcttaaacatttgatttctctgtgtgccgcgtcgccgatgattgccagccagctggcgcgttatccattattgctggatgaattgctcgatccaaacaccctttaccagccgacggcgaccgatgcctaccgcgatgagttgcgccagtatttgctgcgcgtgccggaagatgacgaagagcaacagcttgaggcgctgcgtcagttcaaacaggcgcagctgttacgcatcgccgcagcggatatcgccggtacgctaccggtgatgaaagtgagcgatcacttaacctggctggcggaagccatgatagatgccgtcgttcagcaggcgtgggttcaaatggttgcccgctacggtaagccgaatcacctgaacgaacgcgaagggcgtggttttgcggtggtcggctacggcaagctgggcggctgggagttaggctacagttccgatcttgaccttatcttcctccatgattgcccaatggatgcgatgactgacggtgagcgggaaatcgacgggcggcagttttatctgcgtctggcgcaacgcattatgcatctgttcagtacgcgtacctcttccggcattttgtatgaagtggatgctcgactgcgtccgtccggggcggcgggaatgctggtgacatccgcagaagcatttgccgattatcagaaaaacgaggcctggacgtgggaacatcaggcgctggtgcgtgcgcgtgtagtgtacggcgatccgcagctcaccgcgcactttgacgcagtgcgtcgcgagattatgacgctgccgcgtgaaggtaaaactctgcaaacggaagtgcgggaaatgcgcgagaaaatgcgcgctcatctcggcaataaacatcgcgatcgctttgatatcaaagctgatgaagggggaattaccgatatcgaatttattacccaatatctggtgttgcgctacgctcatgaaaaaccgaagttaacgcgctggtcagacaacgtgcgtattctggaactactggcgcaaaacgacattatggaagagcaggaagcgatggcgctgacccgtgcttacactacgcttcgcgatgaacttcatcatctggcattacaggaattgccgggccatgtgtcggaggattgcttcaccgcagagcgtgaactggtgcgggcaagctggcagaagtggctggtggaagaatga

SEQ ID NO: 278 - DNA, 1302 bp, Escherichia coli
  CDS (1)...(1302)
atggctcaggaaatcgaattaaagtttattgttaatcacagtgccgttgaggcgttgcgtgaccatctcaatacgctgggcggcgagcaccatgaccccgtgcagttgctgaatatttactacgaaacgccggataactggctgcgtgggcacgatatgggcttacgtattcgtggcgaaaacggtcgctatgagatgaccatgaaagttgcaggaagagtgacaggcggcttacatcagcgcccggaatataacgtggcgttgagcgaaccgacgctcgacctggcgcagttaccgacggaagtctggccgaacggcgaattgcccgccgatctcgcctcccgcgtgcagccgctgttcagcaccgatttttatcgcgaaaaatggctggtggcggtcgatggtagccaaattgaaatcgccctcgaccagggggaagtgaaagcgggtgaatttgctgaacctatctgtgagctggaactggaactgcttagcggcgacacgcgcgcggtgctgaaactggcgaaccaactggtatcgcaaaccggattacgccagggcagcctgagcaaagcggcgcgtggctatcatctggcgcagggcaatccggcgcgtgaaatcaaaccgaccaccattttgcatgttgcggcaaaagccgatgtggaacaggggctggaagcggcgctcgagctggcgttagcgcaatggcagtatcatgaagaactgtgggtacgcggcaacgatgcggcgaaagaacaggtgctggcagccattagcctggtccgtcatacgctgatgctgttcggtggtattgtgccgcgtaaagcgagcactcacttacgtgatctgctgactcaatgcgaggcgaccattgcttctgcggtgtctgccgtgacggcggtctactctaccgaaacggcaatggcgaagctggcgttgaccgaatggttggtaagcaaagcatggcagccatttttagatgccaaagcgcagggcaaaatcagcgactccttcaaacgctttgccgatatccatctttcccgccatgccgctgaactgaaaagcgttttctgccagccgttaggcgatcgctaccgtgaccagttgccacgcctgacgcgtgatattgactcaatactgttgctggcgggttactatgatcctgtcgtcgcgcaagcctggctggagaactggcaggggctgcatcacgctattgcgaccgggcaacgcatcgaaattgaacatttccgtaatgaggcaaacaatcaggaaccgttctggttgcacagcggaaaacgttaa

SEQ ID NO: 279 - DNA, 624 bp, Escherichia coli
  CDS (1)...(624)
gtgctcaacaaactctccttactgctgaaagacgcaggtatttcgcttaccgatcaccagaaaaaccagcttattgcctacgtgaatatgctgcataaatggaacaaagcgtacaacctgacttcggtccgcgatcctaatgagatgctggtacgccatattctcgatagcattgtggtggcaccgtatctgcaaggtgaacggtttatcgatgtcggcaccggaccaggactgccaggcattccactctctatcgtgcgtcctgaagcccatttcactctgttggatagccttggtaaacgcgtgcgtttccttcgtcaggtgcaacatgagcttaaactggagaatattgaaccagtacagagcagggtagaagagtttccttcagagccgccatttgatggcgtaattagccgcgcttttgcctctctgaacgatatggtgagctggtgccaccatcttcctggtgagcaaggccgtttctacgcgctgaaagggcaaatgccggaagatgaaatcgctttgttgcccgaagaatatcaggtcgaatcagtggttaaacttcaggttccagccctggatggcgaacgtcatctggtggtgattaaagcaaataaaatttaa

SEQ ID NO: 280 - DNA, 1890 bp, Escherichia coli
  CDS (1)...(1890)
atgttttatccggatccttttgacgtcatcatcattggcgggggtcatgcaggcaccgaggccgcgatggccgcggcgcgtatgggtcaacagactctgcttttgacacacaatatcgacactctggggcagatgagctgcaacccggcgatcggcggtattgggaagggacatctggtaaaagaagtggatgcactcggcggtctgatggcgaaagcgatcgatcaggcgggtatccagtttaggatactaaacgcaagcaaaggaccggcggttcgcgctacccgagctcaggcggatcgtgtgctctaccgtcaggcggtacgtacggcgctggagaaccaaccgaacctgatgatcttccagcaggcggttgaagatcttattgtcgaaaacgatcgcgtggtcggtgctgttacccaaatgggactgaagttccgtgccaaagccgtcgtgctcaccgttgggacgttcctcgacggtaaaattcatatcggtctggataattacagcggtggccgtgctggtgatccgccgtccattccgctttctcgccgtttgcgtgaactgccgctgcgcgttggtcgtctgaaaaccgggacaccaccgcgtattgatgctcgaaccatcgactttagcgtactggcgcaacagcatggcgataacccaatgccggtattctcgtttatgggcaatgcgtcccagcatccccagcaggtgccgtgttatatcactcataccaacgagaaaacccatgatgtgatccgcagtaacctcgatcgtagcccaatgtacgcaggggtgatcgaaggtgtcggcccacgctactgcccgtcgatcgaagacaaagtcatgcgcttcgccgacagaaatcagcatcagatcttccttgaaccggaaggactgacctctaatgaaatttatccgaacggtatctccaccagcctgccgttcgatgtgcagatgcaaatcgtccgctctatgcaggggatggaaaacgcgaagatcgtgcgtccgggttatgccattgagtatgacttcttcgatcctcgcgacctgaaaccgacgctggagagcaagtttatccaggggctgttctttgctggtcagattaacggcactaccggttacgaagaagccgctgcgcaaggtttgctggccggtcttaacgctgcccgtctgtctgctgacaaagaaggttgggctccggcacgttctcaggcgtatctcggcgtactagttgatgacctgtgcactttaggaaccaaagaaccgtatcgtatgtttacttcgcgcgcagaatatcgtctgatgctacgcgaagataatgcggatctgcgtttgactgaaatcggtcgtgaactgggcctggtggatgacgaacgttgggcgcgctttaacgagaaacttgagaatatcgagcgtgagcgtcagcgtctgaaatcgacctgggtaaccccgtcggcggaagctgcagccgaagtgaatgctcacctgactgcgccgctttcccgtgaagccagtggtgaagatctgctgcgtcgtccggaaatgacttatgaaaaattaaccacgctgacgccgtttgcccctgcgttgacagacgaacaggcggcggaacaggttgagattcaggttaaatacgaaggttatatcgcgcgccagcaagatgagatcgaaaagcagctgcgtaacgagaacaccctgctacccgcgacactggattaccgccaggtatccggtctttctaacgaagtgatcgccaaacttaacgatcacaaaccagcctctatcggccaagcttcgcgtatttctggcgtcacgcctgcggccatctccattctgctggtgtggctgaaaaaacagggtatgctgcgtcgtagcgcataa

SEQ ID NO: 281 - DNA, 444 bp, Escherichia coli
  CDS (1)...(444)
atggcagatatcactcttatcagcggcagcaccctcggcggtgccgaatatgtagcagaacacctggctgaaaagctggaagaggcgggttttaccaccgaaacgctgcacggtccgctgttagaagatttacctgcctcagggatctggctggttatcagctccacccacggtgccggagatattccggacaacctttctcctttctatgaagcattgcaggaacagaagcccgatctttctgcagtccgctttggcgcaatcggtattggcagtcgtgaatatgacaccttttgtggggctatcgataaactcgaggcagaactcaaaaattccggtgcaaaacagacaggcgaaacactgaagatcaacattcttgatcacgacattccggaagatccggcagaagaatggctgggatcgtgggttaatttactcaaataa

SEQ ID NO: 282 - DNA, 456 bp, Escherichia coli
  CDS (1)...(456)
gtgggtcagcgaaacgtttcgctgatggagaaaaaaatgaaaaaaggcaccgttcttaattctgatatttcatcggtgatctcccgtctgggacataccgatacgctggtggtgtgtgatgctggtttacccatccccaaaagtacaacgcgtatcgatatggcattaacccagggtgtaccttcttttatgcaggtgctgggcgtcgtcacaaatgaaatgcaggtcgaggcggccattatcgcggaagagatcaaacaccataatccgcaactccacgaaacgttgctcactcaccttgagcagctgcaaaaacaccagggaaataccattgaaattcgttacaccacgcatgaacaattcaaacaacaaaccgcagaaagtcaggcggtaattcgcagcggagaatgttctccgtatgcgaatatcattctctgtgctggcgtgacgttctga

SEQ ID NO: 283 - DNA, 1506 bp, Escherichia coli
  CDS (1)...(1506)
atggaagcattacttcagcttaaaggcatcgataaagccttcccgggcgtaaaagccctctcgggcgcagcgttaaatgtctatccgggccgcgtgatggcgctggtgggcgaaaacggcgcgggtaaatccaccatgatgaaagtgcttactggcatctatactcgcgatgccggtacgcttttatggctggggaaagaaacgacatttaccgggccaaaatcttcccaggaagccgggattgggattatccatcaggaactgaacctgatcccgcagttgaccattgccgaaaacattttcctcggtcgtgagtttgttaatcgctttggcaaaattgactggaaaaccatgtatgccgaagcggataaattgctggctaaacttaacctgcgctttaaaagcgacaagctggtgggcgatctttccatcggtgaccagcaaatggttgaaatcgccaaagtgctgagctttgagtcgaaagtcatcattatggatgaaccgaccgatgcgctgaccgataccgaaaccgaatccctgttccgcgtcatccgcgagctgaaatcgcaaggccgcggtattgtctatatctcccaccgcatgaaagaaatcttcgagatttgcgatgacgttaccgtttttcgtgatgggcaatttattgctgagcgcgaagtggcatcactgaccgaagattcgctgattgagatgatggtgggtcgcaagctggaagatcaatatccgcacctggacaaagcgccgggagatatccgcctgaaagtcgataatctctgcggacctggcgttaacgatgtctcttttactttacgcaaaggcgaaattcttggcgtctctggtttgatgggcgcaggtcgtaccgaactgatgaaagtgctctacggcgcactaccgcgcaccagcggttacgtcaccctggatgggcatgaagtcgttacccgttcaccgcaggatggcctggcaaacggcattgtgtatatctccgaagaccgtaaacgtgacggtttagtgttgggcatgtcagtaaaagagaacatgtcgctgacagcgctgcgctacttcagccgcgctggcggcagtttgaagcatgccgatgaacagcaggctgtgagtgatttcattcgtctgtttaatgtgaaaactccgtcgatggaacaggcaattggtctgctttccggtggcaatcagcaaaaagtggcgattgcccgcggtctgatgacacgccccaaagtgttgatccttgatgaacctacccgtggcgtagatgtcggcgcgaaaaaagagatctatcaactgattaaccagttcaaagccgatggcttgagcatcattctggtgtcatcggagatgccagaagtattaggcatgagcgatcgcatcatcgtcatgcatgaagggcatctcagcggggaatttactcgtgagcaggccacccaggaagtgttaatggctgccgctgtgggcaagcttaatcgcgtgaatcaggagtaa

SEQ ID NO: 284 - DNA, 966 bp, Escherichia coli
  CDS (1)...(966)
atgacaacccagactgtctctggtcgccgttatttcacgaaagcgtggctgatggagcagaaatcgcttatcgctctgctggtgctgatcgcgattgtctcgacgttaagcccgaactttttcaccatcaataacttattcaatattctccagcaaacctcagtgaacgccattatggcggtcgggatgacgctggtgatcctgacgtcgggcatcgacttatcggtaggttctctgttggcgctgaccggcgcagttgctgcatctatcgtcggcattgaagtcaatgcgctggtggctgtcgctgctgctctcgcgttaggtgccgcaattggtgcggtaaccggggtgattgtagcgaaaggtcgcgtccaggcgtttatcgctacgctggttatgatgcttttactgcgcggcgtgaccatggtttataccaacggtagcccagtgaataccggctttactgagaacgccgatctgtttggctggtttggtattggtcgtccgctgggcgtaccgacgccagtctggatcatggggattgtcttcctcgcggcctggtacatgctgcatcacacgcgtctggggcgttacatctacgcgctgggcggcaacgaagcggcaacgcgtctttctggtatcaacgtcaataaaatcaaaatcatcgtctattctctttgtggtctgctggcatcgctggccgggatcattgaagtggcgcgtctctcctccgcacaacccacggcggggactggctatgagctggatgctattgctgcggtggttctgggcggtacgagtctggcgggcggaaaaggtcgcattgttgggacgttgatcggcgcattaattcttggcttccttaataatggattgaatttgttaggtgtttcctcctattaccagatgatcgtcaaagcggtggtgattttgctggcggtgctggtagacaacaaaaagcagtaa

SEQ ID NO: 285 - DNA, 891 bp, Escherichia coli
  CDS (1)...(891)
atgaacatgaaaaaactggctaccctggtttccgctgttgcgctaagcgccaccgtcagtgcgaatgcgatggcaaaagacaccatcgcgctggtggtctccacgcttaacaacccgttctttgtatcgctgaaagatggcgcgcagaaagaggcggataaacttggctataacctggtggtgctggactcccagaacaacccggcgaaagagctggcgaacgtgcaggacttaaccgttcgcggcacaaaaattctgctgattaacccgaccgactccgacgcagtgggtaatgctgtgaagatggctaaccaggcgaacatcccggttatcactcttgaccgccaggcaacgaaaggtgaagtggtgagccacattgcttctgataacgtactgggcggcaaaatcgctggtgattacatcgcgaagaaagcgggtgaaggtgccaaagttatcgagctgcaaggcattgctggtacatccgcagcccgtgaacgtggcgaaggcttccagcaggccgttgctgctcacaagtttaatgttcttgccagccagccagcagattttgatcgcattaaaggtttgaacgtaatgcagaacctgttgaccgctcatccggatgttcaggctgtattcgcgcagaatgatgaaatggcgctgggcgcgctgcgcgcactgcaaactgccggtaaatcggatgtgatggtcgtcggatttgacggtacaccggatggcgaaaaagcggtgaatgatggcaaactagcagcgactatcgctcagctacccgatcagattggcgcgaaaggcgtcgaaaccgcagataaagtgctgaaaggcgagaaagttcaggctaagtatccggttgatctgaaactggttgttaagcagtag

SEQ ID NO: 286 - DNA, 930 bp, Escherichia coli
  CDS (1)...(930)
atgcaaaacgcaggcagcctcgttgttcttggcagcattaatgctgaccacattcttaatcttcaatcttttcctactccaggcgaaaccgtaaccggtaaccactatcaggttgcatttggcggcaaaggcgcgaatcaggctgtggctgctgggcgtagcggtgcgaatatcgcgtttattgcctgtacgggtgatgacagcattggtgagagcgttcgccagcagctcgccactgataacattgatattactccggtcagcgtgatcaaaggcgaatcaacaggtgtggcgctgatttttgttaatggcgaaggtgagaatgtcatcggtattcatgccggcgctaatgctgccctttccccggcgctggtggaagcgcaacgtgagcgtattgccaacgcgtcagcattattaatgcagctggaatcaccactcgaaagtgtgatggcagcggcgaaaatcgcccatcaaaataagactatcgttgcgcttaacccggctccggctcgcgaacttcctgacgaactgctggcgctggtggacattattacgccaaacgaaacggaagcagaaaagctcaccggtattcgtgttgaaaatgatgaagatgcagcgaaggcggcgcaggtactgcatgaaaaaggtatccgtactgtactgattactttaggaagtcgtggtgtatgggctagcgtgaatggtgaaggtcagcgcgttcctggattccgggtgcaggctgtcgataccattgctgccggagatacctttaacggtgcgttaatcacggcattgctggaagaaaaaccattgccagaggcgattcgttttgcccatgctgccgctgcgattgccgtaacacgtaaaggcgcacaaccttccgtaccgtggcgtgaagagatcgacgcatttttagacaggcagaggtga

SEQ ID NO: 287 - protein, 38 aa, Escherichia coli [sequence omitted]

SEQ ID NO: 288 - protein, 443 aa, Escherichia coli
MAKQPGLDFQSAKGGLGELKRRLLFVIGALIVFRIGSFIPIPGIDAAVLAKLLEQQRGTIIEMFNMFSGGALSRASIFALGIMPYISASIIIQLLTVVHPTLAEIKKEGESGRRKISQYTRYGTLVLAIFQSIGIATGLPNMPGMQGLVINPGFAFYFTAVVSLVTGTMFLMWLGEQITERGIGNGISIIIFAGIVAGLPPAIAHTIEQARQGDLHFLVLLLVAVLVFAVTFFVVFVERGQRRIVVNYAKRQQGRRVYAAQSTHLPLKVNMAGVIPAIFASSIILFPATIASWFGGGTGWNWLTTISLYLQPGQPLYVLLYASAIIFFCFFYTALVFNPRETADNLKKSGAFVPGIRPGEQTAKYIDKVMTRLTLVGALYITFICLIPEFMRDAMKVPFYFGGTSLLIVVVVIMDFMAQVQTLMMSSQYESALKKANLKGYGR

SEQ ID NO: 289 - protein, 144 aa, Escherichia coli [sequence omitted]

SEQ ID NO: 290 - protein, 59 aa, Escherichia coli [sequence omitted]

SEQ ID NO: 291 - protein, 167 aa, Escherichia coli
MAHIEKQAGELQEKLIAVNRVSKTVKGGRIFSFTALTVVGDGNGRVGFGYGKAREVPAAIQKAMEKARRNMINVALNNGTLQHPVKGVHTGSRVFMQPASEGTGIIAGGAMRAVLEVAGVHNVLAKAYGSTNPINVVRATIDGLENMNSPEMVAAKRGKSVEEILGK

SEQ ID NO: 292 - protein, 117 aa, Escherichia coli [sequence omitted]

SEQ ID NO: 293 - protein, 177 aa, Escherichia coli [sequence omitted]

SEQ ID NO: 294 - protein, 130 aa, Escherichia coli
MSMQDPIADMLTRIRNGQAANKAAVTMPSSKLKVAIANVLKEEGFIEDFKVEGDTKPELELTLKYFQGKAVVESIQRVSRPGLRIYKRKDELPKVMAGLGIAVVSTSKGVMTDRAARQAGLGGEIICYVA

SEQ ID NO: 295 - protein, 101 aa, Escherichia coli
MAKQSMKAREVKRVALADKYFAKRAELKAIISDVNASDEDRWNAVLKLQTLPRDSSPSRQRNRCRQTGRPHGFLRKFGLSRIKVREAAMRGEIPGLKKASW

SEQ ID NO: 296 - protein, 179 aa, Escherichia coli [sequence omitted]

SEQ ID NO: 297 - protein, 104 aa, Escherichia coli [sequence omitted]

SEQ ID NO: 298 - protein, 123 aa, Escherichia coli [sequence omitted]

SEQ ID NO: 299 - protein, 485 aa, Escherichia coli
MGIYFTNSDDQIYFKRSEGMSDINHAGSDLIFELEDRPPFHQALVGAITHLLAIFVPMVTPALIVGAALQLSAETTAYLVSMAMIASGIGTWLQVNRYGIVGSGLLSIQSVNFSFVTVMIALGSSMKSDGFHEELIMSSLLGVSFVGAFLVVGSSFILPYLRRVITPTVSGIVVLMIGLSLIKVGIIDFGGGFAAKSSGTFGNYEHLGVGLLVLIVVIGFNCCRSPLLRMGGIAIGLCVGYIASLCLGMVDFSSMRNLPLITIPHPFKYGFSFSFHQFLVVGTIYLLSVLEAVGDITATAMVSRRPIQGEEYQSRLKGGVLADGLVSVIASAVGSLPLTTFAQNNGVIQMTGVASRYVGRTIAVMLVILGLFPMIGGFFTTIPSAVLGGAMTLMFSMIAIAGIRIIITNGLKRRETLIVATSLGLGLGVSYDPEIFKILPASIYVLVENPICAGGLTAILLNIILPGGYRQENVLPGITSAEEMD

SEQ ID NO: 300 - protein, 439 aa, Escherichia coli
MMSGEHTLKAVRGSFIDVTRTIDNPEEIASALRFIEDGLLLIKQGKVEWFGEWENGKHQIPDTIRVRDYRGKLIVPGFVDTHIHYPQSEMVGAYGEQLLEWLNKHTFPTERRYEDLEYAREMSAFFIKQLLRNGTTTALVFGTVHPQSVDALFEAASHINMRMIAGKVMMDRNAPDYLLDTAESSYHQSKELIERWHKNGRLLYAITPRFAPTSSPEQMAMAQRLKEEYPDTWVHTHLCENKDEIAWVKSLYPDHDGYLDVYHQYGLTGKNCVFAHCVHLEEKEWDRLSETKSSIAFCPTSNLYLGSGLFNLKKAWQKKVKVGMGTDIGAGTTFNMLQTLNEAYKVLQLQGYRLSAYEAFYLATLGGAKSLGLDDLIGNFLPGKEADFVVMEPTATPLQQLRYDNSVSLVDKLFVMMTLGDDRSIYRTYVDGRLVYERN

SEQ ID NO: 301 - protein, 189 aa, Escherichia coli
MSGDILQTPDAPKPQGALDNYFKITARGSTVRQEVLAGLTTFLAMVYSVIVVPGMLGKAGFPPAAVFVATCLVAGFGSLLMGLWANLPMAIGCAISLTAFTAFSLVLGQQISVPVALGAVFLMGVIFTAISVTGVRTWILRNLPMGIAHGTGIGIGLFLLLIAANGVGMVIKNPIEGLQWRSVRLPPSR

SEQ ID NO: 302 - protein, 276 aa, Escherichia coli
MALGAFTSFPVMMSLLGLAVIFGLEKCRVPGGILLVIIAISIIGLIFDPAVKYHGLVAMPSLTGEDGKSLIFSLDIMGALQPTVLPSVLALVMTAVFDATGTIRAVAGQANLLDKDNQIINGGKALTSDSVSSIFSGLVGAAPAAVYIESAAGTAAGGKTGLTATVVGALFLLILFLSPLSFLIPGYATAPALMYVGLLMLSNVSKLDFNDFIDAMAGLVCAVFIVLTCNIVTGIMLGFVTLVVGRVFAREWQKLNIGTVIITAALVAFYAGGWAI

SEQ ID NO: 303 - protein, 466 aa, Escherichia coli
MNSEGGKPGNVLTVNGNYTGNNGLMTFNATLGGDNSPTDKMNVKGDTQGNTRVRVDNIGGVGAQTVNGIELIEVGGNSAGNFALTTGTVEAGAYVYTLAKGKGNDEKNWYLTSKWDGVTPADTPDPINNPPVVDPEGPSVYRPEAGSYISNIAAANSLFSHRLHDRLGEPQYTDSLHSQGSASSMWMRHVGGHERSRAGDGQLNTQANRYVLQLGGDLAQWSSNAQDRWHLGVMAGYANQHSNTQSNRVGYKSDGRISGYSAGLYATWYQNDANKTGAYVDSWALYNWFDNSVSSDNRSADDYDSRGVTASVEGGYTFEAGTFSGSEGTLNTWYVQPQAQITWMGVKDSDHTRKDGTRIETEGDGNVQTRLGVKTYLNSHHQRDDGKQREFQPYIEANWINNSKVYAVKMNGQTVGREGARNLGEVRTGVEAKVNNNLSLWGNVGVQLGDKGYSDTQGMLGVKYSW

SEQ ID NO: 304 - protein, 1325 aa, Escherichia coli
MNRIYRVIWNCTLQVFQACSELTRRAGKTSTVNLRKSSGLTTKFSRLTLGVLLALSGSASGASLEVDNDQITNIDTDVAYDAYLVGWYGTGVLNILAGGNASLTTITTSVIGANEDSEGTVNVLGGTWRLYDSGNNARPLNVGQSGTGTLNIKQKGHVDGGYLRLGSSTGGVGTVNVEGEDSVLTTELFEIGSYGTGSLNITDKGYVTSSIVAILGYQAGSNGQVVVEKGGEWLIKNNDSSIEFQIGNQGTGEATIREGGLVTAENTIIGGNATGIGTLNVQDQDSVITVRRLYNGYFGNGTVNISNNGLINNKEYSLVGVQDGSHGVVNVTDKGHWNFLGTGEAFRYIYIGDAGDGELNVSSEGKVDSGIITAGMKETGTGNITVKDKNSVITNLGTNLGYDGHGEMNISNQGLVVSNGGSSLGYGETGVGNVSITTGGMWEVNKNVYTTIGVAGVGNLNISDGGKFVSQNITFLGDKASGIGTLNLMDATSSFDTVGINVGNFGSGIVNVSNGATLNSTGYGFIGGNASGKGIVNISTDSLWNLKTSSTNAQLLQVGVLGTGELNITTGGIVKARDTQIALNDKSKGDVRVDGQNSLLETFNMYVGTSGTGTLTLTNNGTLNVEGGEVYLGVFEPAVGTLNIGAAHGEAAADAGFITNATKVEFGLGEGVFVFNHTNNSDAGYQVDMLITGDDKDGKVIHDAGHTVFNAGNTYSGKTLVNDGLLTIASHTADGVTGMGSSEVTIANPGTLDILASTNSAGDYTLTNALKGDGLMRVQLSSSDKMFGFTHATGTEFAGVAQLKDSTFTLERDNTAALTHAMLQSDSENTTSVKVGEQSIGGLAMNGGTIIFDTDIPAATLAEGYISVDTLVVGAGDYTWKGRNYQVNGTGDVLIDVPKPWNDPMANNPLTTLNLLEHDDSHVGVQLVKAQTVIGSGGSLTLRDLQGDEVEADKTLHIAQNGTVVAEGDYGFRLTTAPGNGLYVNYGLKALNIHGGQKLTLAEHGGAYGATADMSAKIGGEGDLAINTVRQVSLSNGQNDYQGATYVQMGTLRTDADGALGNTRELNISNAAIVDLNGSTQTVETFTGQMGSTVLFKEGALTVNKGGISQGELTGGGNLNVTGGTLAIEGLNARYNALTSISPNAEVSLDNTQGLGRGNIANDGLLTLKNVTGELRNSISGKGIVSATARTDVELDGDNSRFVGQFNIDTGSALSVNEQKNLGDASVINNGLLTISTERSWAMTHSISGSGDVTKLGTGILTLNNDSAAYQGTTDIVGGEIAFGSDSAINMASQHINIHNSGVMSGNVTTAGDMNVMPGGGTACR

SEQ ID NO: 305 - protein, 251 aa, Escherichia coli
MTEAQRHQILLEMLAQLGFVTVEKVVERLGISPATARRDINKLDESGKLKKVRNGAEAITQQRPRWTPMNLHQAQNHDEKVRIAKAASQLVNPGESVVINCGSTAFLLGREMCGKPVQIITNYLPLANYLIDQEHDSVIIMGGQYNKSQSITLSPQGSENSLYAGHWMFTSGKGLTAEGLYKTDMLTAMAEQKMLSVVGKLVVLVDSSKIGERAGMLFSRADQIDMLITGKNANPEILQQLEAQGVSILRV

SEQ ID NO: 306 - protein, 274 aa, Escherichia coli
MTEFTTLLQQGNAWFFIPSAILLGALHGLEPGHSKTMMAAFIIAIKGTIKQAVMLGLAATISHTAVVWLIAFGGMVISKRFTAQSAEPWLQLISAVIIISTAFWMFWRTWRGERNWLENMHGHDYEHHHHDHEHHHDHGHHHHHEHGEYQDAHARAHANDIKRRFDGREVTNWQILLFGLTGGLIPCPAAITVLLICIQLKALTLGATLVVSFSIGLALTLVTVGVGAAISVQQVAKRWSGFNTLAKRAPYFSSLLIGLVGVYMGVHGFMGIMR

SEQ ID NO: 307 - protein, 172 aa, Escherichia coli
MILKSAISADSLLAKDAFRASFHLHFLRNHGITNKISLVSYIVWQERYATDITDPQSGEFMTIKNKMLLGALLLVTSAAWAAPATAGSTNTSGISKYELSSFIADFKHFKPGDTVPEMYRTDEYNIKQWQLRNLPAPDAGTHWTYMGGAYVLISDTDGKIIKAYDGEIFYHR

SEQ ID NO: 308 - protein, 344 aa, Escherichia coli
MEIRIMLFILMMMVMPVSYAACYSELSVQHNLVVQGDFALTQTQMATYEHNFNDSSCVSTNTITPMSPSDIIVGLYNDTIKLNLHFEWTNKNNITLSNNQTSFTSGYSVTVTPAASNAKVNVSAGGGGSVMINGVATLSSASSSTRGSAAVQFLLCLLGGKSWDACVNSYRNALAQNAGVYSFNLTLSYNPITTTCKPDDLLITLDSIPVSQLPATGNKATINSKQGDIILRCKNLLGQQNQTSRKMQVYLSSSDLLTNSNTILKGAEDNGVGFILESNGSPVTLLNITNSSKGYTNLKEVAAKSKLTDTTVSIPITASYYVYDTNKVKSGALEATALINVKYD

SEQ ID NO: 309 - protein, 826 aa, Escherichia coli
MLRMTPLASAIVALLLGIEAYAAEETFDTHFMIGGMKDQQVANIRLDDNQPLPGQYDIDIYVNKQWRGKYEIIVKDNPQETCLSREVIKRLGINSDNFASGKQCLTFEQLVQGGSYTWDIGVFRLDFSVPQAWVEELESGYVPPENWERGINAFYTSYYLSQYYSDYKASGNNKSTYVRFNSGLNLLGWQLHSDASFSKTNNNPGVWKSNTLYLERGFAQLLGTLRVGDMYTSSDIFDSVRFRGVRLFRDMQMLPNSKQNFTPRVQGIAQSNALVTIEQNGFVVYQKEVPPGPFAITDLQLAGGGADLDVSVKEADGSVTTYLVPYAAVPNMLQPGVSKYDLAAGRSHIEGASKQSDFVQAGYQYGFNNLLTLYGGSMVANNYYAFTLGAGWNTRIGAISVDATKSHSKQDNGDVFDGQSYQIAYNKFVSQTSTRFGLAAWRYSSRDYRTFNDHVWANNKDNYRRDENDVYDIADYYQNDFGRKNSFSANMSQSLPEGWGSVSLSTLWRDYWGRSGSSKDYQLSYSNNLRRISYTLAASQAYDENHHEEKRFNIFISIPFDWGDDVSTPRRQIYMSNSTTFDDQGFASNNTGLSGTVGSRDQFNYGVNLSHQHQGNETTAGANLTWNAPVATVNGSYSQSSTYRQAGASVSGGIVAWSGGVNLANRLSETFAVMNAPGIKDAYVNGQKYRTTNRNGVVIYDGMTPYRENHLMLDVSQSDSEAELRGNRKIAAPYRGAVVLVNFDTDQRKPWFIKALRADGQSLTFGYEVNDIHGHNIGVVGQGSQLFIRTNEVPPSVNVAIDKQQGLSCTITFGKEIDESRNYICQ

SEQ ID NO: 310 - protein, 239 aa, Escherichia coli
MAAIPWRPFNLRGIKMKGLLSLLIFSMVLPAHAGIVIYGTRIIYPAENKEVMVQLMNQGNRSSLLQAWIDDGDTSLPPEKIQVPFMLTPPVAKIGANSGQQVKIKIMPNKLPTNKESIFYLNVLDIPPNSPEQEGKNALKFAMQNRIKLFYRPAGIAPVNKATFKKLLVNRSGNGLVIKNDSANWVTISDVKANNVKVNYETIMIAPLESQSVNVKSNNANNWHLTIIDDHGNYISDKI

SEQ ID NO: 311 - protein, 180 aa, Escherichia coli
MKRSIIAAAVFSSFFMSAGVFAADVDTGTLTIKGNIAESPCKFEAGGDSVSINMPTVPTSVFEGKAKYSTYDDAVGVTSSMLKISCPKEVAGVKLSLITNDKITGNDKAIASSNDTVGYYLYLGDNSDVLDVSAPFNIESYKTAEGQYAIPFKAKYLKLTDNSVQSGDVLSSLVMRVAQD

SEQ ID NO: 312 - protein, 95 aa, Escherichia coli
MLHTLHRSPWLTDFAALLRLLSEGDELLLLQDGVTAAVDGNRYLESLRNAPIKVYALNEDLIARGLTGQISNDIILIDYTDFVRLTVKHPSQMAW

SEQ ID NO: 313 - protein, 119 aa, Escherichia coli
MKRIAFVFSTAPHGTAAGREGLDALLATSALTDDLAVFFIADGVFQLLPGQKPDAVLARDYIATFKLLGLYDIEQCWVCAASLRERGLDPQTPFVVEATPLEADALRRELANYDVILRF

SEQ ID NO: 314 - protein, 128 aa, Escherichia coli
MRFAIVVTGPAYGTQQASSAFQFAQALIADGHELSSVFFYREGVYNANQLTSPASDEFDLVRAWQQLNAQHGVALNICVAAALRRGVVDETEAGRLGLASSNLQQGFTLSGLGALAEASLTCDRVVQF

SEQ ID NO: 315 - protein, 244 aa, Escherichia coli
MFFFMSRSLLTNETSELDLLDQRPFDQTDFDILKSYEAVVDGLAMLIGSHCEIVLHSLQDLKCSAIRIANGEHTGRKIGSPITDLALRMLHDMTGADSSVSKCYFTRAKSGVLMKSLTIAIRNREQRVIGLLCINMNLDVPFSQIMSTFVPPETPDVGSSVNFASSVEDLVTQTLEFTIEEVNADRNVSNNAKNRQIVLNLYEKGIFDIKDAINQVADRLNISKHTVYLYIRQFKSGDFQGQDK

SEQ ID NO: 316 - protein, 84 aa, Escherichia coli
MTDKIRTLQGRVVSDKMEKSIVVAIERFVKHPIYGKFIKRTTKLHVHDENNECGIGDVVEIRECRPLSKTKSWTLVRVVEKAVL

SEQ ID NO: 317 - protein, 63 aa, Escherichia coli [sequence omitted]

SEQ ID NO: 318 - protein, 136 aa, Escherichia coli [sequence omitted]

SEQ ID NO: 319 - protein, 233 aa, Escherichia coli
MGQKVHPNGIRLGIVKPWNSTWFANTKEFADNLDSDFKVRQYLTKELAKASVSRIVIERPAKSIRVTIHTARPGIVIGKKGEDVEKLRKVVADIAGVPAQINIAEVRKPELDAKLVADSITSQLERRVMFRRAMKRAVQNAMRLGAKGIKVEVSGRLGGAEIARTEWYREGRVPLHTLRADIDYNTSEAHTTYGVIGVKVWIFKGEILGGMAAVEQPEKPAAQPKKQQRKGRK

SEQ ID NO: 320 - protein, 110 aa, Escherichia coli [sequence omitted]

SEQ ID NO: 321 - protein, 92 aa, Escherichia coli
MPRSLKKGPFIDLHLLKKVEKAVESGDKKPLRTWSRRSTIFPNMIGLTIAVHNGRQHVPVFVTDEMVGHKLGEFAPTRTYRGHAADKKAKKK

SEQ ID NO: 322 - protein, 273 aa, Escherichia coli [sequence omitted]

SEQ ID NO: 323 - protein, 100 aa, Escherichia coli [sequence omitted]

SEQ ID NO: 324 - protein, 201 aa, Escherichia coli [sequence omitted]

SEQ ID NO: 325 - protein, 209 aa, Escherichia coli [sequence omitted]

SEQ ID NO: 326 - protein, 103 aa, Escherichia coli
MQNQRIRIRLKAFDHRLIDQATAEIVETAKRTGAQVRGPIPLPTRKERFTVLISPHVNKDARDQYEIRTHLRLVDIVEPTEKTVDALMRLDLAAGVDVQISLG

SEQ ID NO: 327 - protein, 104 aa, Escherichia coli
MIRKAFVMQVNPDAHEEYQRRHNPIWPELEAVLKSHGAHNYAIYLDKARNLLFAMVEIESEERWNAVASTDVCQRWWKYMTDVMPANPDNSPVSSELQEVFYLP

SEQ ID NO: 328 - protein, 287 aa, Escherichia coli
MIRSMTAYARREIKGEWGSATWEMRSVNQRYLETYFRLPEQFRSLEPVVRERIRSRLTRGKVECTLRYEPDVSAQGELILNEKLAKQLVTAANWVKMQSDEGEINPVDILRWPGVMAAQEQDLDAIAAEILAALDGTLDDFIVARETEGQALKALIEQRLEGVTAEVVKVRSHMPEILQWQRERLVAKLEDAQVQLENNRLEQELVLLAQRIDVAEELDRLEAHVKETYNILKKKEAVGRRLDFMMQEFNRESNTLASKSINAEVTNSAIELKVLIEQMREQIQNIE

SEQ ID NO: 329 - protein, 163 aa, Escherichia coli
MSTETIEIFNNSDEWANQLKHALSKGENLALLHGLTPDILDRIYAYAFDYHEKGNITDAEIYYKFLCIYAFENHEYLKDFASVCQPKKKYQQAYDLYKLSYNYFPYDDYSVIYRMGQCQIGAKNIDNAMQCFYHIINNCEDDSVKSKAQAYIELLNDNSEDNG

SEQ ID NO: 330 - protein, 648 aa, Escherichia coli
MNILGFFQRLGRALQLPIAVLPVAALLLRFGQPDLLNVAFIAQAGGAIFDNLALIFAIGVASSWSKDSAGAAALAGAVGYFVLTKAMVTINPEINMGVLAGIITGLVGGAAYNRWSDIKLPDFLSFFGGKRFVPIATGFFCLVLAAIFGYVWPPVQHAIHAGGEWIVSAGALGSGIFGFINRLLIPTGLHQVLNTIAWFQIGEFTNAAGTVFHGDINRFYAGDGTAGMFMSGFFPIMMFGLPGAALAMYFAAPKERRPMVGGMLLSVAVTAFLTGVTEPLEFLFMFLAPLLYLLHALLTGISLFVATLLGIHAGFSFSAGAIDYALMYNLPAASQNVWMLLVMGVIFFAIYFVVFSLVIRMFNLKTPGREDKEDEIVTEEANSNTEEGLTQLATNYIAAVGGTDNLKAIDACITRLRLTVADSARVNDTMCKRLGASGVVKLNKQTIQVIVGAKAESIGDAMKKVVARGPVAAASAEATPATAAPVAKPQAVPNAVSIAELVSPITGDVVALDQVPDEAFASKAVGDGVAVKPTDKIVVSPAAGTIVKIFNTNHAFCLETEKGAEIVVHMGIDTVALEGKGFKRLVEEGAQVSAGQPILEMDLDYLNANARSMISPVVCSNIDDFSGLIIKAQGHIVAGQTPLYEIKK

SEQ ID NO: 331 - protein, 412 aa, Escherichia coli
MKTIFRYILFLALYSCCNTVSAYTSFIVGNNAGVDNYRGPSTAAQMTFNYTSTASNLVFYKPTQLGPTGVKMYWSYLDTGTGGGILYCNTSGRANPGPITIENAMVYSGKDYGGHKLFNTSVPGLYYTMLISRVWSAYDTITDIQSPGIYIGDPSNQEFFFSVTDSDLQTKGCNKADDYDKFWAIGGIVHNITVEFYTDTNFDPTLNQQVQLSSSSNYLYSFKAYSPGTKVVDHSNHIYVNFTLNNVKLTLPTCFTSILTGPSVNGSTVRMGEYSSGTIKNGASPVPFDISLQNCIRVRNIETKLVTGKVGTQNTQLLGNTLTGSTAAKGVGVLIEGLATSKNPLMTLKPNDTNSVYIDYETEDDTSDGVYPNQGNGTSQPLHFQATLKQDGNIAIEPGEFKATSTFQVTYP

SEQ ID NO: 332 - protein, 198 aa, Escherichia coli
MHPTQRKLMKRIILFLSLLFCIACPAIAGQDIDLVANVKNSTCKSGISNQGNIDLGVVGVGYFSGNVTPESYQPGGKEFTITVSDCALQGTGDVLNQLHIDFRALSGVMAAGSRQIFANEISSGASNVGVVIFSTQDSANTFNVLNASGGSRSVYPVMSDDMNGSSWKFSTRMQKIDPALSVTSGQLMSHVLVDIYYE

SEQ ID NO: 333 - protein, 201 aa, Escherichia coli
MMTFKNLRYGLSSSVVLAASLFSVLSYAATDSIGLTVITTVEMGTCTATLVNDSDQDISVVDFGDVYISEINAKTKVKTFKLKFKDCAGIPNKKAQIKLTKRATCEGTANDGAGFANGSTAADKASAVAVEVWSTVTPATGSATQFSCVTPASQEVTISTAANAVVYYPMSARLVVEKNKTVNNVTAGKFSAPATFTVTYN

SEQ ID NO: 334 - protein, 203 aa, Escherichia coli
MEFGVRFSNYKGRQMIKTTPHKIVILMGILLSPSVFATDINVEFTATVKATTCNITLTGNNVTNDGNNNYTLRIPKMGLDKIANKTTESQADFKLVASGCSSGISWIDTTLTGNASSSSPKLIIPQSGDSSSTTSNIGMGFKKRTTDDATFLKPNSAEKIRWSTDEMQPDKGLEMTVALRETDAGQGVPGNFRALATFNFIYQ

SEQ ID NO: 335 - protein, 139 aa, Escherichia coli
MAMTYHLDVVSAEQQMFSGLVEKIQVTGSEGELGIYPGHAPLLTAIKPGMIRIVKQHGHEEFIYLSGGILEVQPGNVTVLADTAIRGQDLDEARAMEAKRKAEEHISSSHGDVDYAQASAELAKAIAQLRVIELTKKAM

SEQ ID NO: 336 - protein, 460 aa, Escherichia coli
MATGKIVQVIGAVVDVEFPQDAVPRVYDALEVQNGNERLVLEVQQQLGGGIVRTIAMGSSDGLRRGLDVKDLEHPIEVPVGKATLGRIMNVLGEPVDMKGEIGEEERWAIHRAAPSYEELSNSQELLETGIKVIDLMCPFAKGGKVGLFGGAGVGKTVNMMELIRNIAIEHSGYSVFAGVGERTREGNDFYHEMTDSNVIDKVSLVYGQMNEPPGNRLRVALTGLTMAEKFRDEGRDVLLFVDNIYRYTLAGTEVSALLGRMPSAVGYQPTLAEEMGVLQERITSTKTGSITSVQAVYVPADDLTDPSPATTFAHLDATVVLSRQIASLGIYPAVDPLDSTSRQLDPLVVGQEHYDTARGVQSILQRYQELKDIIAILGMDELSEEDKLVVARARKIQRFLSQPFFVAEVFTGSPGKYVSLKDTIRGFKGIMEGEYDHLPEQAFYMVGSIEEAVEKAKKL

SEQ ID NO: 337 - protein, 287 aa, Escherichia coli
MAGAKEIRSKIASVQNTQKITKAMEMVAASKMRKSQDRMAASRPYAETMRKVIGHLAHGNLEYKHPYLEDRDVKRVGYLVVSTDRGLCGGLNINLFKKLLAEMKTWTDKGVQCDLAMIGSKGVSFFNSVGGNVVAQVTGMGDNPSLSELIGPVKVMLQAYDEGRLDKLYIVSNKFINTMSQVPTISQLLPLPASDDDDLKHKSWDYLYEPDPKALLDTLLRRYVESQVYQGVVENLASEQAARMVAMKAATDNGGSLIKELQLVYNKARQASITQELTEIVSGAAAV

SEQ ID NO: 338 - protein, 513 aa, Escherichia coli
MQLNSTEISELIKQRIAQFNVVSEAHNEGTIVSVSDGVIRIHGLADCMQGEMISLPGNRYAIALNLERDSVGAVVMGPYADLAEGMKVKCTGRILEVPVGRGLLGRVVNTLGAPIDGKGPLDHDGFSAVEAIAPGVIERQSVDQPVQTGYKAVDSMIPIGRGQRELIIGDRQTGKTALAIDAIINQRDSGIKCIYVAIGQKASTISNVVRKLEEHGALANTIVVVATASESAALQYLAPYAGCAMGEYFRDRGEDALIIYDDLSKQAVAYRQISLLLRRPPGREAFPGDVFYLHSRLLERAARVNAEYVEAFTKGEVKGKTGSLTALPIIETQAGDVSAFVPTNVISITDGQIFLETNLFNAGIRPAVNPGISVSRVGGAAQTKIMKKLSGGIRTALAQYRELAAFSQFASDLDDATRKQLDHGQKVTELLKQKQYAPMSVAQQSLVLFAAERGYLADVELSKIGSFEAALLAYVDRDHAPLMQEINQTGGYNDEIEGKLKGILDSFKATQSW

SEQ ID NO: 339 - protein, 177 aa, Escherichia coli
MSEFITVARPYAKAAFDFAVEHQSVERWQDMLAFAAEVTKNEQMAELLSGALAPETLAESFIAVCGEQLDENGQNLIRVMAENGRLNALPDVLEQFIHLRAVSEATAEVDVISAAALSEQQLAKISAAMEKRLSRKVKLNCKIDKSVMAGVIIRAGDMVIDGSVRGRLERLADVLQS

SEQ ID NO: 340 - protein, 156 aa, Escherichia coli
MNLNATILGQAIAFVLFVLFCMKYVWPPLMAAIEKRQKEIADGLASAERAHKDLDLAKASATDQLKKAKAEAQVIIEQANKRRSQILDEAKAEAEQERTKIVAQAQAEIEAERKRAREELRKQVAILAVAGAEKIIERSVDEAANSDIVDKLVAEL

SEQ ID NO: 341 - protein, 79 aa, Escherichia coli
MENLNMDLLYMAAAVMMGLAAIGAAIGIGILGGKFLEGAARQPDLIPLLRTQFFIVMGLVDAIPMIAVGLGLYVMFAVA

SEQ ID NO: 342 - protein, 271 aa, Escherichia coli
MASENMTPQDYIGHHLNNLQLDLRTFSLVDPQNPPATFWTINIDSMFFSVVLGLLFLVLFRSVAKKATSGVPGKFQTAIELVIGFVNGSVKDMYHGKSKLIAPLALTIFVWVFLMNLMDLLPIDLLPYIAEHVLGLPALRVVPSADVNVTLSMALGVFILILFYSIKMKGIGGFTKELTLQPFNHWAFIPVNLILEGVSLLSKPVSLGLRLFGNMYAGELIFILIAGLLPWWSQWILNVPWAIFHILIITLQAFIFMVLTIVYLSMASEEH

SEQ ID NO: 343 - protein, 130 aa, Escherichia coli
MKNVMSVSLVSRNVARKLLLVQLLVVIASGLLFSLKDPFWGVSAISGGLAVFLPNVLFMIFAWRHQAHTPAKGRVAWTFAFGEAFKVLAMLVLLVVALAVLKAVFLPLIVTWVLVLVVQILAPAVINNKG

SEQ ID NO: 344 - protein, 413 aa, Escherichia coli
MQKHGDRYVWINPPAIPLSTEEMDSVFALPYKRVPHPAYGNARIPAYEMIRFSVNIMRGCFGGCSFCSITEHEGRIIQSRSEDSIINEIEAIRDTVPGFTGVISDLGGPTANMYMLRCKSPRAEQTCRRLSCVYPDICPHMDTNHEPTINLYRRARDLKGIKKILIASGVRYDIAVEDPRYIKELATHHVGGYLKIAPEHTEEGPLSKMMKPGMGSYDRFKELFDTYSKQAGKEQYLIPYFISAHPGTRDEDMVNLALWLKKHRFRLDQVQNFYPSPLANSTTMYYTGKNPLAKIGYKSEDVFVPKGDKQRRLHKALLRYHDPANWPLIRQALEAMGKKHLIGSRRDCLVPAPTIEEMREARRQNRNTRPALTKHTPMATQRQTPATAKKASSTQSRPVNAGAKKRPKAAVGR

SEQ ID NO: 345 - protein, 325 aa, Escherichia coli
MSSISLIQPDRDLFSWPQYWAACFGPAPFLPMSREEMDQLGWDSCDIILVTGDAYVDHPSFGMAICGRMLEAQGFRVGIIAQPDWSSKDDFMRLGKPNLFFGVTAGNMDSMINRYTADRRLRHDDAYTPDNVAGKRPDRATLVYTQRCKEAWKDVPVILGGIEASLRRTAHYDYWSDTVRRSVLVDSKADMLMFGNGERPLVEVAHRLAMGEPISEIRDVRNTAIIVKEALPGWSGVDSTRLDTPGKIDPIPHPYGEDLPCADNKPVAPKKQEAKAVTVQPPRPKPWEKTYVLLPSFEKVKGDKVLYAHASRILHHETNPAVPAH

SEQ ID NO: 346 - protein, 226 aa, Escherichia coli
MIQYLNVFFYDIYPYICATVFFLGSWLRYDYGQYTWRASSSQMLDKRGMVIWSNLFHIGILGIFFGHLFGMLTPHWMYAWFLPVAAKQLMAMVLGGICGVLTLIGGAGLLWRRLTNQRVRATSTTPDIIIMSILLIQCLLGLSTIPFSAQYPDGSEMMKLVGWAQSIVTFRGGSSEMLNGVAFVFRLHLVLGMTIFLLFPFTRLVHVWSAPFEYFTRRYQIVRSRR

SEQ ID NO: 347 - protein, 231 aa, Escherichia coli
MQILKVIGLLMEYPDELLWECKEDALALIRRDAPMLTDFTHNLLNAPLLDKQAEWCEVFDRGRTTSLLLFEHVHAESRDRGQAMVDLLAEYEKVGLQLDCRELPDYLPLYLEYLSVLPDDQAKEGLLNVAPILALLGGRLKQREAPWYALFDALLQLAGSSLSSDSVTKQVNSEERDDTRQALDAVWEEEQVKFIEDNATACDSSPLNQYQRRFSQDVAPQYVDISAGGGK

SEQ ID NO: 348 - protein, 514 aa, Escherichia coli
MKIRSQVGMVLNLDKCIGCHTCSVTCKNVWTGREGMEYAWFNNVETKPGIGYPKNWEDQEEWQGGWVRDVNGKIRPRLGNKMGVITKIFANPVVPQIDDYYEPFTFDYEHLHSAPEGKHIPTARPRSLIDGKRMDKVIWGPNWEELLGGEFEKRARDRNFEAMQKEMYGQFENTFMMYLPRLCEHCLNPSCVATCPSGAIYKREEDGIVLIDQDKCRGWRLCISGCPYKKIYFNWKSGKSEKCIFCYPRIESGQPTVCSETCVGRIRYLGVLLYDADRIEEAASTEREVDLYERQCEVFLDPHDPSVIEEALKQGIPQNVIDAAQRSPVYKMAMDWKLALPLHPEYRTLPMVWYVPPLSPIQSYADAGGLPKSEGVLPAIESLRIPVQYLANMLSAGDTGPVLRALKRMMAMRHYMRSQTVEGVTDTRAIDEVGLSVAQVEEMYRYLAIANYEDRFVIPTSHREMAGDAFAERNGCGFTFGDGCHGSDSKFNLFNSSRIDAINITEVRDKAEGE

SEQ ID NO: 349 - protein, 1246 aa, Escherichia coli
MSKLLDRFRYFKQKGETFADGHGQVMHSNRDWEDSYRQRWQFDKIVRSTHGVNCTGSCSWKIYVKNGLVTWEIQQTDYPRTRPDLPNHEPRGCPRGASYSWYLYSANRLKYPLIRKRLIELWREALKQHSDPVLAWASIMNDPQKCLSYKQVRGRGGFIRSNWQELNQLIAAANVWTIKTYGPDRVAGFSPIPAMSMVSYAAGTRYLSLLGGTCLSFYDWYCDLPPASPMTWGEQTDVPESADWYNSSYIIAWGSNVPQTRTPDAHFFTEVRYKGTKTIAITPDYSEVAKLCDQWLAPKQGTDSALAMAMGHVILKEFHLDNPSDYFINYCRRYSDMPMLVMLEPRDDGSYVPGRMIRASDLVDGLGESNNPQWKTVAVNTAGELVVPNGSIGFRWGEKGKWNLESIAAGTETELSLTLLGQHDAVAGVAFPYFGGIENPHFRSVKHNPVLVRQLPVKNLTLVDGNTCPVVSVYDLVLANYGLDRGLEDENSAKDYAEIKPYTPAWGEQITGVPRQYIETIAREFADTAHKTHGRSMIILGAGVNHWYHMDMNYRGMINMLIFCGCVGQSGGGWAHYVGQEKLRPQTGWLPLAFALDWNRPPRQMNSTSFFYNHSSQWRYEKVSAQELLSPLADASKYSGHLIDFNVRAERMGWLPSAPQLGRNPLGIKAEADKAGLSPTEFTAQALKSGDLRMACEQPDSSSNHPRNLFVWRSNLLGSSGKGHEYMQKYLLGTESGIQGEELGASDGIKPEEVEWQTAAIEGKLDLLVTLDFRMSSTCLFSDIVLPTATWYEKDDMNTSDMHPFIHPLSAAVDPAWESRSDWEIYKGIAKAFSQVCVGHLGKETDVVLQPLLHDSPAELSQPCEVLDWRKGECDLIPGKTAPNIVAVERDYPATYERFTSLGPLMDKLGNGGKGISWNTQDEIDFLGKLNYTKRDGPAQGRPLIDTAIDASEVILALAPETNGHVAVKAWQALGEITGREHTHLALHKEDEKIRFRDIQAQPRKIISSPTWSGLESDHVSYNAGYTNVHELIPWRTLSGRQQLYQDHPWMRAFGESLVAYRPPIDTRSVSEMRQIPPNGFPEKALNFLTPHQKWGIHSTYSENLLMLTLSRGGPIVWISETDARELTIVDNDWVEVFNANGALTARAVVSQRVPPGMTMMYHAQERIMNIPGSEVTGMRGGIHNSVTRVCPKPTHMIGGYAQLAWGFNYYGTVGSNRDEFIMIRKMKNVNWLDDEGRDQVQEAKK

SEQ ID NO: 350 - protein, 165 aa, Escherichia coli [sequence omitted]

SEQ ID NO: 351 - protein, 212 aa, Escherichia coli
MAVAANKRSVMTLFSGPTDIYSHQVRIVLAEKGVSFEIEHVEKDNPPQDLIDLNPNQSVPTLVDRELTLWESRIIMEYLDERFPHPPLMPVYPVARGESRLYMHRIEKDWYTLMNTIINGSASEADAARKQLREELLAIAPVFGQKPYFLSDEFSLVDCYLAPLLWRLPQLGIEFSGPGAKELKGYMTRVFERDSFLASLTEAEREMRLGRS

SEQ ID NO: 352 - protein, 505 aa, Escherichia coli
MSEQHAQGADAVVDLNNELKTRREKLANLREQGIAFPNDFRRDHTSDQLHAEFDGKENEELEALNIEVAVAGRMMTRRIMGKASFVTLQDVGGRIQLYVARDDLPEGVYNEQFKKWDLGDILGAKGKLFKTKTGELSIHCTELRLLTKALRPLPDKFHGLQDQEARYRQRYLDLISNDESRNTFKVRSQILSGIRQFMVNRGFMEVETPMMQVIPGGAAARPFITHHNALDLDMYLRIAPELYLKRLVVGGFERVFEINRNFRNEGISVRHNPEFTMMELYMAYADYKDLIELTESLFRTLAQDILGKTEVTYGDVTLDFGKPFEKLTMREAIKKYRPETDMADLDNFDSAKAIAESIGIHVEKSWGLGRIVTEIFEEVAEAHLIQPTFITEYPAEVSPLARRNDVNPEITDRFEFFIGGREIGNGFSELNDAEDQAQRFLDQVAAKDAGDDEAMFYDEDYVTALEHGLPPTAGLGIGIDRMVMLFTNSHTIRDVILFPAMRPVK

SEQ ID NO: 353 - protein, 365 aa, Escherichia coli
MFEINPVNNRIQDLTERSDVLRGYLDYDAKKERLEEVNAELEQPDVWNEPERAQALGKERSSLEAVVDTLDQMKQGLEDVSGLLELAVEADDEETFNEAVAELDALEEKLAQLEFRRMFSGEYDSADCYLDIQAGSGGTEAQDWASMLERMYLRWAESRGFKTEIIEESEGEVAGIKSVTIKISGDYAYGWLRTETGVHRLVRKSPFDSGGRRHTSFSSAFVYPEVDDDIDIEINPADLRIDVYRTSGAGGQHVNRTESAVRITHIPTGIVTQCQNDRSQHKNKDQAMKQMKAKLYELEMQKKNAEKQAMEDNKSDIGWGSQIRSYVLDDSRIKDLRTGVETRNTQAVLDGSLDQFIEASLKAGL

SEQ ID NO: 354 - protein, 577 aa, Escherichia coli
MKQQIQLRRREVDETADLPAELPPLLRRLYASRGVRSAQELERSVKGMLPWQQLSGVEKAVEILYNAFREGTRIIVVGDFDADGATSTALSVLAMRSLGCSNIDYLVPNRFEDGYGLSPEVVDQAHARGAQLIVTVDNGISSHAGVEHARSLGIPVIVTDHHLPGDTLPAAEAIINPNLRDCNFPSKSLAGVGVAFYLMLALRTFLRDQGWFDERNIAIPNLAELLDLVALGTVADVVPLDANNRILTWQGMSRIRAGKCRPGIKALLEVANRDAQKLAASDLGFALGPRLNAAGRLDDMSVGVALLLCDNIGEARVLANELDALNQTRKEIEQGMQIEALTLCEKLERSRDTLPGGLAMYHPEWHQGVVGILASRIKERFHRPVIAFAPAGDGTLKGSGRSIQGLHMRDALERLDTLYPGMMLKFGGHAMAAGLSLEEDKFKLFQQRFGELVTEWLDPSLLQGEVVSDGPLSPAEMTMEVAQLLRDAGPWGQMFPEPLFDGHFRLLQQRLVGERHLKVMVEPVGGGPLLDGIAFNVDTALWPDNGVREVQLAYKLDINEFRGNRSLQIIIDNIWPI

SEQ ID NO: 355 - protein, 236 aa, Escherichia coli
MKKGFMLFTLLAAFSGFAQADDAAIQQTLAKMGIKSSDIQPAPVAGMKTVLTNSGVLYITDDGKHIIQGPMYDVSGTAPVNVTNKMLLKQLNALEKEMIVYKAPQEKHVITVFTDITCGYCHKLHEQMADYNALGITVRYLAFPRQGLDSDAEKEMKAIWCAKDKNKAFDDVMAGKSVAPASCDVDIADHYALGVQLGVSGTPAVVLSNGTLVPGYQPPKEMKEFLDEHQKMTSGK

SEQ ID NO: 356 - protein, 298 aa, Escherichia coli
MKQDLARIEQFLDALWLEKNLAENTLNAYRRDLSMMVEWLHHRGLTLATAQSDDLQALLAERLEGGYKATSSARLLSAVRRLFQYLYREKFREDDPSAHLASPKLPQRLPKDLSEAQVERLLQAPLIDQPLELRDKAMLEVLYATGLRVSELVGLTMSDISLRQGVVRVIGKGNKERLVPLGEEAVYWLETYLEHGRPWLLNGVSIDVLFPSQRAQQMTRQTFWHRIKHYAVLAGIDSEKLSPHVLRHAFATHLLNHGADLRVVQMLLGHSDLSTTQIYTHVATERLRQLHQQHHPRA

SEQ ID NO: 357 - protein, 367 aa, Escherichia coli
MSDSQTLVVKLGTSVLTGGSRRLNRAHIVELVRQCAQLHAAGHRIVIVTSGAIAAGREHLGYPELPATIASKQLLAAVGQSRLIQLWEQLFSIYGIHVGQMLLTRADMEDRERFLNARDTLRALLDNNIVPVINENDAVATAEIKVGDNDNLSALAAILAGADKLLLLTDQKGLYTADPRSNPQAELIKDVYGIDDALRAIAGDSVSGLGTGGMSTKLQAADVACRAGIDTIIAAGSKPGVIGDVMEGISVGTLFHAQATPLENRKRWIFGAPPAGEITVDEGATAAILERGSSLLPKGIKSVTGNFSRGEVIRICNLEGRDIAHGVSRYNSDALRRIAGHHSQEIDAILGYEYGPVAVHRDDMITR

SEQ ID NO: 358 - protein, 417 aa, Escherichia coli
MLEQMGIAAKQASYKLAQLSSREKNRVLEKIADELEAQSEIILNANAQDVADARANGLSEAMLDRLALTPARLKGIADDVRQVCNLADPVGQVIDGGVLDSGLRLERRRVPLGVIGVIYEARPNVTVDVASLCLKTGNAVILRGGKETCRTNAATVAVIQDALKSCGLPAGAVQAIDNPDRALVSEMLRMDKYIDMLIPRGGAGLHKLCREQSTIPVITGGIGVCHIYVDESVEIAEALKVIVNAKTQRPSTCNTVETLLVNKNIADSFLPALSKQMAESGVTLHADAAALAQLQAGPAKVVAVKAEEYDDEFLSLDLNVKIVSDLDDAIAHIREHGTQHSDAILTRDMRNAQRFVNEVDSSAVYVNASTRFTDGGQFGLGAEVAVSTQKLHARGPMGLEALTTYKWIGIGDYTIRA

SEQ ID NO: 359 - protein, 186 aa, Escherichia coli
MMTRQASMKGFPIAHIFHPSIPPMHAVVNNHNRNIDYWTVKRKFAEIVSTNDVNKIYSISNELRRVLSAITALNFYHGDVPSVMIRIQPENMSPFIIDISTGEHDDYIIQTLDVGTFAPFGEQCTCSAVNKKELECIKETISKYCAKFTRKEAILTPLVHFNKTSITSDCWQILFFSPDHFNNDFY

SEQ ID NO: 360 - protein, 395 aa, Escherichia coli
MFPVSSIGNDISSDLVRRKMNDLPESPTGNNLEALAPGIEKLKQTSIEMVTLLNTLQPGGKCIITGDFQKELAYLQNVILYNVSSLRLDFLGYNAQIIQRSDNTCELTINEPLKNQEISTGNININCPLKDIYNEIRRLNVIFSCGTGDIVDLSSLDLRNVDLDYYDFTDKHMANTILNPFKLNSTNFTNANMFQVNFVSSTQNATISWDYLLKITPVLISISDMYSEEKIKFVESCLNEPGDITEEQLKIMRFAIIKSIPRATLTDKLENELTKEIYKSSSKIINCLNRIKLTEMKEFSSEKIYDYIDIIIEDYENTKENAYLVVPQINYTMDLNIEDSSSEELLSDNTLEKDENSPDNGFEVGEYNTYEAYNSEKQYFTREDYTYDYDLLNAI

SEQ ID NO: 361 - protein, 315 aa, Escherichia coli
MCHRAFRLHLCKDWVFMFSGLLIILVPLIVGYLIPLRQQAALKVINQLLSWMVYLILFFMGISLAFLDNLASNLLAILHYSAVSITVILLCNIAALMWLERGLPWRNHHQQEKLPSRIAMALESLKLCGVVVIGFAIGLSGLAFLQHATEASEYTLILLLFLVGIQLRNNGMTLKQIVLNRRGMIVAVVVVVSSLIGGLINAFILDLPINTALAMASGFGWYSLSGILLTESFGPVIGSAAFFNDLARELIAIMLIPGLIRRSRSTALGLCGATSMDFTLPVLQRTGGLDMVPAAIVHGFILSLLVPILIAFFSA

SEQ ID NO: 362 - protein, 96 aa, Escherichia coli
MQNTTHDNVILELTVRNHPGVMTHVCGLFARRAFNVEGILCLPIQDSDKSHIWLLVNDDQRLEQMISQIDKLEDVVKVQRNQSDPTMFNKIAVFFQ

SEQ ID NO: 363 - protein, 562 aa, Escherichia coli
MASSGTTSTRKRFTGAEFIVHFLEQQGIKIVTGIPGGSILPVYDALSQSTQIRHILARHEQGAGFIAQGMARTDGKPAVCMACSGPGATNLVTAIADARLDSIPLICITGQVPASMIGTDAFQEVDTYGISIPITKHNYLVRHIEELPQVMSDAFRIAQSGRPGPVWIDIPKDVQTAVFEIETQPAMAEKAAAPAFSEESIRDAAAMINAAKRPVLYLGGGVINAPARVRELAEKAQLPTTMTLMALGMLPKAHPLSLGMLGMHGVRSTNYILQEADLLIVLGARFDDRAIGKTEQFCPNAKIIHVDIDRAELGKIKQPHVAIQADVDDVLAQLIPLVEAQPRAEWHQLVADLQREFPCPIPKACDPLSHYGLINAVAACVDDNAIITTDVGQHQMWTAQAYPLNRPRQWLTSGGLGTMGFGLPAAIGAALANPDRKVLCFSGDGSLMMNIQEMATASENQLDVKIILMNNEALGLVHQQQSLFYEQGVFAATYPGKINFMQIAAGFGLETCDLNNEADPQASLQEIINRPGPALIHVRIDAEEKVYPMVPPGAANTEMVGE

SEQ ID NO: 364 - protein, 32 aa, Escherichia coli
MTTSMLNAKLLPTAPSAAVVVVRVVVVVGNAP

SEQ ID NO: 365 - protein, 338 aa, Escherichia coli
MFVIWSHRTGFIMSHQLTFADSEFSSKRRQTRKEIFLSRMEQILPWQNMVEVIEPFYPKAGNGRRPYPLETMLRIHCMQHWYNLSDGAMEDALYEIASMRLFARLSLDSALPDRTTIMNFRHLLEQHQLARQLFKTINRWLAEAGVMMTQGTLVDATIIEAPSSTKNKEQQRDPEMHQTKKGNQWHFGMKAHIGVDAKSGLTHSLVTTAANEHDLNQLGNLLHGEEQFVSADAGYQGAPQREELAEVDVDWLIAERPGKVRTLKQHPRKNKTAINIEYMKASIRARVEHPFRIIKRQFGFVKARYKGLLKNDNQLAMLFTLANLFRADQMIRQWERSH

SEQ ID NO: 366 - protein, 157 aa, Escherichia coli
MVYIIIVSHGHEDYIKKLLENLNADDEHYKIIVRDNKDSLLLKQICQHYAGLDYISGGVYGFGHNNNIAVAYVKEKYRPADDDYILFLNPDIIMKHDDLLTYIKYVESKRYAFSTLCLFRDEAKSLHDYSVRKFPVLSDFIVSFMLGIKEGANKSLI

SEQ ID NO: 367 - protein, 372 aa, Escherichia coli
MGKSIVVVSAVNFTTGGPFTILKKFLAATNNKENVSFIALVHSAKELKESYPWVKFIEFPEVKGSWLKRLHFEYVVCKKLSKELNATHWICLHDITANVVTKKRYVYCHNPAPFYKGILFREILMEPSFFLFKMLYGLIYKINIKKNTAVFVQQFWMKEKFIKKYSINNIIVSRPEIKLSDKSQLTDDDSQFKNNPSELTIFYPAVPRVFKNYELIISAARKLKEQSNIKFLLTISGTENAYAKYIISLAEGLDNVHFLGYLDKEKIDHCYNISDIVCFPSRLETWGLPLSEAKERGKWVLASDFPFTRETLGSYEKKAFFDSNNDDMLVKLIIDFKKGNLKKDISDANFIYRNENVLVGFDELVNFITEEH

SEQ ID NO: 368 - protein, 196 aa, Escherichia coli
MILKLAKRYGLCGFIRLVRDVLLTRVFYRNCRIIRFPCYIRNDGSINFGENFTSGVGLRLDAFGRGVIFFSDNVQVNDYVHIASIESVTIGRDTLIASKVFITDHNHGSFKHSDPMSSPNIPPDMRTLESSAVVIGQRVWLGENVTVLPGTIIGNGVVVGANSVVRGSIPENTVIAGVPAKIIKKYNHETKLWEKA

SEQ ID NO: 369 - protein, 330 aa, Escherichia coli
MYFLNDLNFSRRDAGFKARKDALDIASDYENISVVNIPLWGGVVQRIISSVKLSTFLCGLENKDVLIFNFPMAKPFWHILSFFHRLLKFRIVPLIHDIDELRGGGGSDSVRLATCDMVISHNPQMTKYLSKYMSQDKIKDIKIFDYLVSSDVEHRDVTDKQRGVIYAGNLSRHKCSFIYTEGCDFTLFGVNYENKDNPKYLGSFDAQSPEKINLPGMQFGLIWDGDSVETCSGAFGDYLKFNNPHKTSLYLSMELPVFIWDKAALADFIVDNRIGYAVGSIKEMQEIVDSMTIETYKQISENTKIISQKIRTGSYFRDVLEEVIDDLKTR

SEQ ID NO: 370 - protein, 388 aa, Escherichia coli
MIYLVISVFLITAFICLYLKKDIFYPAVCVNIIFALVLLGYEITSDIYAFQLNDATLIFLLCNVLTFTLSCLLTESVLDLNIRKVNNAIYSIPSKKVHNVGLLVISFSMIYICMRLSNYQFGTSLLSYMNLIRDADVEDTSRNFSAYMQPIILTTFALFIWSKKFTNTKVSKTFTLLVFIVFIFAIILNTGKQIVFMVIISYAFIVGVNRVKHYVYLITAVGVLFSLYMLFLRGLPGGMAYYLSMYLVSPIIAFQEFYFQQVSNSASSHVFWFFERLMGLLTGGVSMSLHKEFVWVGLPTNVYTAFSDYVYISAELSYLMMVIHGCISGVLWRLSRNYISVKIFYSYFIYTFSFIFYHESFMTNISSWIQITLCIIVFSQFLKAQKIK

SEQ ID NO: 371 - protein, 367 aa, Escherichia coli [sequence omitted]

SEQ ID NO: 372 - protein, 230 aa, Escherichia coli
MTSSITNEIMQLYTDREVLNMGLCSRYKSLTCNSCSMHCQIMPEESPRLQYCANSCFCMWPEESSYFNRGVVEGILTKNHNARLSGYIFVDFSVSFLRLFLEKDWIDYLASTDMGIVLVSDRNMQSLANYWRKHNSAISAVIYNDDGLDVANEKIRQLFIGRYLSFTGGNTLTQMEFTIMGYMVSGYNPYQIAEVLDMDIRSIYAYKQRIEKRMGGKINELFIRSHSVQH

SEQ ID NO: 373 - protein, 391 aa, Escherichia coli
MQKLINSVQNYAWGSKTALTELYGMENPSSQPMAELWMGAHPKSSSRVQNAAGDIVSLRDVIESDKSTLLGEAVAKRFGELPFLFKVLCAAQPLSIQVHPNKHNSEIGFAKENAAGIPMDAAERNYKDPNHKPELVFALTPFLAMNAFREFSEIVSLLQPVAGAHPAIAHFLQQPDAERLSELFASLLNMQGEEKSRALAILKSALDSQQGEPWQTIRLISEFYPEDSGLFSPLLLNVVKLNPGEAMFLFAETPHAYLQGVALEVMANSDNVLRAGLTPKYIDIPELVANVKFEAKPANQLLTQPVKQGAELDFPIPVDDFAFSLHDLSDKETTISQQSAAILFCVEGDATLWKGSQQLQLKPGESAFIAANESPVTVKGHGRLARVYNKL

SEQ ID NO: 374 - protein, 264 aa, Escherichia coli
MKQYLELMQKVLDEGTQKNDRTGTGTLSIFGHQMRFNLQDGFPLVTTKRCHLRSIIHELLWFLQGDTNIAYLHENNVTIWDEWADENGDLGPVYGKQWRAWPTPDGRHIDQITTVLNQLKNDPDSRRIIVSAWNVGELDKMALAPCHAFFQFYVADGKLSCQLYQRSCDVFLGLPFNIASYALLVHMMAQQCDLEVGDFVWTGGDTHLYSNHMDQTHLQLSREPRPLPKLIIKRKPESIFDYRFEDFEIEGYDPHPGIKAPVAI

SEQ ID NO: 375 - protein, 291 aa, Escherichia coli
MTSSYLHFPEFDPVIFSIGPVALHWYGLMYLVGFIFAMWLATRRANRPGSGWTKNEVENLLYAGFLGVFLGGRIGYVLFYNFPQFMADPLYLFRVWDGGMSFHGGLIGVIVVMIIFARRTKRSFFQVSDFIAPLIPFGLGAGRLGNFINGELWGRVDPNFPFAMLFPGSRTEDILLLQTNPQWQSIFDTYGVLPRHPSQLYELLLEGVVLFIILNLYIRKPRPMGAVSGLFLIGYGAFRIIVEFFRQPDAQFTGAWVQYISMGQILSIPMIVAGVIMMVWAYRRSPQQHVS

SEQ ID NO: 376 - protein, 241 aa, Escherichia coli
MDSLNLNKHISGQFNAELESIRTQVMTMGGMVEQQLSDAITAMHNQDSDLAKRVIEGDKNVNMMEVAIDEACVRIIAKRQPTASDLRLVMVISKTIAELERIGDVADKICRTALEKFSQQHQPLLVSLESLGRHTIQMLHDVLDAFARMDIDEAVRIYREDKKVDQEYEGIVRQLMTYMMEDSRTIPSVLTALFCARSIERIGDRCQNICEFIFYYVKGQDFRHVGGDELDKLLAGKDSDK

SEQ ID NO: 377 - protein, 257 aa, Escherichia coli
MSMVETAPSKIQVRNLNFYYGKFHALKNINLDIAKNQVTAFIGPSGCGKSTLLRTFNKMFELYPEQRAEGEILLDGDNILTNSQDIALLRAKVGMVFQKPTPFPMSIYDNIAFGVRLFEKLSRADMDERVQWALTKAALWNETKDKLHQSGYSLSGGQQQRLCIARGIAIRPEVLLLDEPCSALDPISTGRIEELITELKQDYTVVIVTHNMQQAARCSDHTAFMYLGELIEFSNTDDLFTKPAKKQTEDYITGRYG

SEQ ID NO: 378 - protein, 296 aa, Escherichia coli
MAMVEMQTTAALAESRRKMQARRRLKNRIALTLSMATMAFGLFWLIWILMSTITRGIDGMSLALFTEMTPPPNTEGGGLANALAGSGLLILWATVFGTPLGIMAGIYLAEYGRKSWLAEVIRFINDILLSAPSIVVGLFVYTIVVAQMEHFSGWAGVIALALLQVPIVIRTTENMLKLVPYSLREAAYALGTPKWKMISAITLKASVSGIMTGILLAIARIAGETAPLLFTALSNQFWSTDMMQPIANLPVTIFKFAMSPFAEWQQLAWAGVLIITLCVLLLNILARVVFAKNKHG

SEQ ID NO: 379 - protein, 319 aa, Escherichia coli
MAATKPAFNPPGKKGDIIFSVLVKLAALIVLLMLGGIIVSLIISSWPSIQKFGLAFLWTKEWDAPNDIYGALVPIYGTLVTSFIALLIAVPVSFGIALFLTELAPGWLKRPLGIAIELLAAIPSIVYGMWGLFIFAPLFAVYFQEPVGNIMSNIPIVGALFSGPAFGIGILAAGVILAIMIIPYIAAVMRDVFEQTPVMMKESAYGIGCTTWEVIWRIVLPFTKNGVIGGIMLGLGRALGETMAVTFIIGNTYQLDSASLYMPGNSITSALANEFAEAESGLHVAALMELGLILFVITFIVLAASKFMIMRLAKNEGAR

SEQ ID NO: 380 - protein, 346 aa, Escherichia coli
MKVMRTTVATVVAATLSMSAFSVFAEASLTGAGATFPAPVYAKWADTYQKETGNKVNYQGIGSSGGVKQIIANTVDFGASDAPLSDEKLAQEGLFQFPTVIGGVVLAVNIPGLKSGELVLDGKTLGDIYLGKIKKWDDEAIAKLNPGLKLPSQNIAVVRRADGSGTSFVFTSYLAKVNEEWKNNVGTGSTVKWPIGLGGKGNDGIAAFVQRLPGAIGYVEYAYAKQNNLAYTKLISADGKPVSPTEENFANAAKGADWSKTFAQDLTNQKGEDAWPITSTTFILIHKDQKKPEQGTEVLKFFDWAYKTGAKQANDLDYASLPDSVVEQVRAAWKTNIKDSSGKPLY

SEQ ID NO: 381 - protein, 236 aa, Escherichia coli
MGSGLVNGGDYFYNNLSFTVTRYNGIMATDSTQCVKKSRGRPKVFDRDAALDKAMKLFWQHGYEATSLADLVEATGAKAPTLYAEFTNKEGLFRAVLDRYIDRFAAKHEAQLFCEEKSVESALADYFAAIANCFTSKDTPAGCFMINNCTTLSPDSGDIANTLKSRHAMQERTLQQFLCQRQARGEIPPHCDVTHLAEFLNCIIQGMSISAREGASLEKLMQIAGTTLRLWPELVK

SEQ ID NO: 382 - protein, 181 aa, Escherichia coli
MQAKIAASNTGELDALQQLGFSLVEGEVDLALPVNNASDSGAVVAQETDIPALRQLASAAFAQSRFRAPWYAPDASSRFYAQWIENAVRGTFDHQCLILRAASGDIRGYVSLRELNATDARIGLLAGRGAGAELMQTALNWAYRRGKTTLRVATQMGNTAALKRYIQSGANVESTAYWLYR

SEQ ID NO: 383 - protein, 376 aa, Escherichia coli
MIPFNAPPVVGTELDYMQSAMGSGKLCGDGGFTRRCQQWLEQRFGSAKVLLTPSCTASLEMAALLLDIQPGDEVIMPSYTFVSTANAFVLRGAKIVFVDVRPDTMNIDETLIEAAITDKTRVIVPVHYAGVACEMDTIMALAKKHNLFVVEDAAQGVMSTYKGRALGTIGHIGCFSFHETKNYTAGGEGGATLINDKALIERAEIIREKGTNRSQFFRGQVDKYTWRDIGSSYLMSDLQAAYLWAQLEAADRINQQRLALWQNYYDALAPLAKAGRIELPSIPDGCVQNAHMFYIKLRDIDDRSALINFLKEAEIMAVFHYIPLHGCPAGEHFGEFHGEDRYTTKESERLLRLPLFYNLSPVNQRTVIATLLNYFS

SEQ ID NO: 384 - protein, 416 aa, Escherichia coli
MSLAKASLWTAASTLVKIGAGLLVGKLLAVSFGPAGLGLAANFRQLITVLGVLAGAGIFNGVTKYVAQYHDNPQQLRRVVGTSSAMVLGFSTLMALVFVLAAAPISQGLFGNTDYQGLVRLVALVQMGIAWGNLLLALMKGFRDAAGNALSLIVGSLIGVLAYYVSYRLGGYEGALLGLALIPALVVIPAAIMLIKRGVIPLSYLKPSWDNGLAGQLSKFTLMALITSVTLPVAYIMMRKLLAAQYSWDEVGIWQGVSSISDAYLQFITASFSVYLLPTLSRLTEKRDITREVVKSLKFVLPAVAAASFTVWLLRDFAIWLLLSNKFTAMRDLFAWQLVGDVLKVGAYVFGYLVIAKASLRFYILAEVSQFTLLMVFAHWLIPAHGALGAAQAYMATYIVYFSLCCGVFLLWRRRA

SEQ ID NO: 385 - protein, 450 aa, Escherichia coli
MSLLQFSGLFVVWLLCTLFIATLTWFEFRRVRFNFNVFFSLLFLLTFFFGFPLTSVLVFRFDVGVAPPEILLQALLSAGCFYAVYYVTYKTRLRKRVADVPRRPLFTMNRVETNLTWVILMGIALVSVGIFFMHNGFLLFRLNSYSQIFSSEVSGVALKRFFYFFIPAMLVVYFLRQDSKAWLFFLVSTVAFGLLTYMIVGGTRANIIIAFAIFLFIGIIRGWISLWMLAAAGVLGIVGMFWLALKRYGMNVSGDEAFYTFLYLTRDTFSPWENLALLLQNYDNIDFQGLAPIVRDFYVFIPSWLWPGRPSMVLNSANYFTWEVLNNHSGLAISPTLIGSLVVMGGALFIPLGAIVVGLIIKWFDWLYELGNREPNRYKAAILHSFCFGAIFNMIVLAREGLDSFVSRVVFFIVVFGACLMIAKLLYWLFESAGLIHKRTKSSLRTQVEG

SEQ ID NO: 386 - protein, 246 aa, Escherichia coli
MNNNTTAPTYTLRGLQLIGWRDMQHALDYLFADGQLKQGTLVAINAEKMLTIEDNAEVRELINAAEFKYADGISVVRSVRKKYPQAQVSRVAGADLWEELMARAGKEGTPVFLVGGKPEVLAQTEAKLRNQWNVNIVGSQDGYFKPEQRQALFERIHASGAQIVTVAMGSPKQEIIMRDCRLVHPDALYMGVGGTYDVFTGHVKRAPKIWQTLGLEWLYRLLSQPSRIKRQLRLLRYLRWHYTGNL

SEQ ID NO: 387 - protein, 74 aa, Escherichia coli
MTVLIHVLGSDIPHHNRTVLRFFNDALAATSEHAREFMVVGKDDGLSDSCPALSVQFFPWEKIAGGSGHRESKS

SEQ ID NO: 388 - protein, 204 aa, Escherichia coli
MRGELLFFPTRMDPSLNTMANDRQREGKMTILVGNSGDRSNEHIAALRAVHQQFGDTVKVVVPMGYPPNNEAYIEEVRQAGLELFSEENLQILSEKLEFDAYLALLRQCDLGYFIFARQQGIGTLCLLIQAGIPCVLNRENPFWQDMTEQHLPVLFTTDDLNEDIVREAQRQLASVDKNTIAFFSPNYLQGWQRALAIAAREVA

SEQ ID NO: 389 - protein, 182 aa, Escherichia coli
MIRQRRRALTPEQQQEMGQQAATRMMTYPPVVMAHTVAVFLSFDGELDTQPLIEQLWRAGKRVYLPVLHPFSAGNLLFLNYHPQSELVMNRLKIHEPKLDVRDVLPLSRLDVLITPLVAFDEYGQRLGMGGGFYDRTLQNWQHYKTQPVGYAHDCQLVEKLPVEEWDIPLPAVVTPSKVWEW

SEQ ID NO: 390 - protein, 91 aa, Escherichia coli [sequence omitted]

SEQ ID NO: 391 - protein, 702 aa, Escherichia coli
MYLFESLNQLIQTYLPEDQIKRLRQAYLVARDAHEGQTRSSGEPYITHPVAVACILAEMKLDYETLMAALLHDVIEDTPATYQDMEQLFGKSVAELVEGVSKLDKLKFRDKKEAQAENFRKMIMAMVQDIRVILIKLADRTHNMRTLGSLRPDKRRRIARETLEIYSPLAHRLGIHHIKTELEELGFEALYPNRYRVIKEVVKAARGNRKEMIQKILSEIEGRLQEAGIPCRVSGREKHLYSIYCKMVLKEQRFHSIMDIYAFRVIVNDSDTCYRVLGQMHSLYKPRPGRVKDYIAIPKANGYQSLHTSMIGPHGVPVEVQIRTEDMDQMAEMGVAAHWAYKEHGETSTTAQIRAQRWMQSLLELQQSAGSSFEFIESVKSDLFPDEIYVFTPEGRIVELPAGATPVDFAYAVHTDIGHACVGARVDRQPYPLSQPLTSGQTVEIITAPGARPNAAWLNFVVSSKARAKIRQLLKNLKRDDSVSLGRRLLNHALGGSRKLNEIPQENIQRELDRMKLATLDDLLAEIGLGNAMSVVVAKNLQHGDASIPPATQSHGHLPIKGADGVLITFAKCCRPIPGDPIIAHVSPGKGLVIHHESCRNIRGYQKEPEKFMAVEWDKETAQEFITEIKVEMFNHQGALANLTAAINTTTSNIQSLNTEEKDGRVYSAFIRLTARDRVHLANIMRKIRVMPDVIKVTRNRN

SEQ ID NO: 392 - protein, 229 aa, Escherichia coli
MNPTRYARICEMLARRQPDLTVCMEQVHKPHNVSAIIRTADAVGVHEVHAVWPGSRMRTMASAAAGSNSWVQVKTHRTIGDAVAHLKGQGMQILATHLSDNAVDFREIDYTRPTCILMGQEKTGITQEALALADQDIIIPMIGMVQSLNVSVASALILYEAQRQRQNAGMYLRENSMLPEAEQQRLLFEGGYPVLAKVAKRKGLPYPHVNQQGEIEADADWWATMQAAG

SEQ ID NO: 393 - protein, 693 aa, Escherichia coli
MKGRLLDAVPLSSLTGVGAALSNKLAKINLHTVQDLLLHLPLRYEDRTHLYPIGELLPGVYATVEGEVLNCNISFGGRRMMTCQISDGSGILTMRFFNFSAAMKNSLAAGRRVLAYGEAKRGKYGAEMIHPEYRVQGDLSTPELQETLTPVYPTTEGVKQATLRKLTDQALDLLDTCAIEELLPPELSQGMMTLPEALRTLHRPPPTLQLSDLETGQHPAQRRLILEELLAHNLSMLALRAGAQRFHAQPLSANDTLKNKLLAALPFKPTGAQARVVAEIERDMALDVPMMRLVQGDVGSGKTLVAALAALRAIAHGKQVALMAPTELLAEQHANNFRNWFAPLGIEVGWLAGKQKGKARLAQQEAIASGQVQMIVGTHAIFQEQVQFNGLALVIIDEQHRFGVHQRLALWEKGQQQGFHPHQLIMTATPIPRTLAMTAYADLDTSVIDELPPGRTPVTTVAIPDTRRTDIIDRVHHACITEGRQAYWVCTLIEESELLEAQAAEATWEELKLALPELNVGLVHGRMKPAEKQAVMASFKQGELHLLVATTVIEVGVDVPNASLMIIENPERLGLAQLHQLRGRVGRGAVASHCVLLYKTPLSKTAQIRLQVLRDSNDGFVIAQKDLEIRGPGELLGTRQTGNAEFKVADLLRDQAMIPEVQRLARHIHERYPQQAKALIERWMPETERYSNA

SEQ ID NO: 394 - protein, 428 aa, Escherichia coli
MKTSLFKSLYFQVLTAIAIGILLGHFYPEIGEQMKPLGDGFVKLIKMIIAPVIFCTVVTGIAGMESMKAVGRTGAVALLYFEIVSTIALIIGLIIVNVVQPGAGMNVDPATLDAKAVAVYADQAKDQGIVAFIMDVIPASVIGAFASGNILQVLLFAVLFGFALHRLGSKGQLIFNVIESFSQVIFGIINMIMRLAPIGAFGAMAFTIGKYGVGTLVQLGQLIICFYITCILFVVLVLGSIAKATGFSIFKFIRYIREELLIVLGTSSSESALPRMLDKMEKLGCRKSVVGLVIPTGYSFNLDGTSIYLTMAAVFIAQATNSQMDIVHQITLLIVLLLSSKGAAGVTGSGFIVLAATLSAVGHLPVAGLALILGIDRFMSEARALTNLVGNGVATIVVAKWVKELDHKKLDDVLNNRAPDGKTHELSS

SEQ ID NO: 395 - protein, 396 aa, Escherichia coli
MTTRQHSSFAIVFILGLLAMLMPLSIDMYLPALPVISAQFGVPAGSTQMTLSTYILGFALGQLIYGPMADSFGRKPVVLGGTLVFAAAAVACALANTIDQLIVMRFFHGLAAAAASVVINALMRDIYPKEEFSRMMSFVMLVTTIAPLMAPIVGGWVLVWLSWHYIFWILALAAILASAMIFFLIKETLPPERRQPFHIRTTIGNFAALFRHKRVLSYMLASGFSFAGMFSFLSAGPFVYIEINHVAPENFGYYFALNIVFLFVMTIFNSRFVRRIGALNMFRSGLWIQFIMAAWMVISALLGLGFWSLVVGVAAFVGCVSMVSSNAMAVILDEFPHMAGTASSLAGTFRFGIGAIVGALLSLATFNSAWPMIWSIAFCATSSILFCLYASRPKKR

SEQ ID NO: 396 - protein, 231 aa, Escherichia coli
MRLDKFIAQQLGVSRAIAGREIRGNRVTVDGEIVRNAAFKLLPEHDVAYDGNPLAQQHGPRYFMLNKPQGYVCSTDDPDHPTVLYFLDEPVAWKLHAAGRLDIDTTGLVLMTDDGQWSHRITSPRHHCEKTYLVTLESPVADDTAEQFAKGVQLHNEKDLTKPAVLEVITPTQVRLTISEGRYHQVKRMFAAVGNHVVELHRERIGGITLDADLAPGEYRPLTEEEIASVV

SEQ ID NO: 397 - protein, 442 aa, Escherichia coli
MKKIECACNFLMDKDAQGYIDLSDLDLTSCHFKGDVISKVSFLSSNLQHVTFECKEIGDCNFTTAIVDNVIFRCRRLHNVIFIKASGECVDFSKNILDTVDFSQSQLGHSNFRECQIRNSNFDNCYLYASHFTRAEFLSAKEISFIKSNLTAVMFDYVRMSTGNFKDCITEQLELTIDYSDIFWNEDLDGYINNIIKMIDTLPDNAMILKSVLAVKLVMQLKILNIVNKNFIENMKKIFSHCPYIKDPIIRSYIHSDEDNKFDDFMRQHRFSEVNFDTQQMIDFINRFNTNKWLIDKNNNFFIQLIDQALRSTDDMIKANVWHLYKEWIRSDDVSPIFIETEDNLRTFNTNELTRNDNIFILFSSVDDGPVMVVSSQRLHDMLNPTKDTNWNSTYIYKSRHEMLPVNLTQETLFSSKSHGKYALFPIFTASWRAHRIMNKGV

SEQ ID NO: 398 - protein, 238 aa, Escherichia coli
MGRKWANIVAKKTAKDGATSKIYAKFGVEIYAAAKQGEPDPELNTSLKFVIERAKQAQVPKHVIDKAIDKAKGGGDETFVQGRYEGFGPNGSMIIAETLTSNVNRTIANVRTIFNKKGGNIGAAGSVSYMFDNTGVIVFKGTDPDHIFEILLEAEVDVRDVTEEEGNIVIYTEPTDLHKGIAALKAAGITEFSTTELEMIAQSEVELSPEDLEIFEGLVDALEDDDDVQKVYHNVANL

SEQ ID NO: 399 - protein, 261 aa, Escherichia coli
MVLMSETKNELEDLLEKAATEPAHRPAFFRTLLESTVWVPGTAAQGEAVVEDSALDLQHWEKEDGTSVIPFFTSLEALQQAVEDEQAFVVMPVRTLFEMTLGETLFLNAKLPTGKEFMPREISLLIGEEGNPLSSQEILEGGESLILSEVAEPPAQMIDSLTTLFKTIKPVKRAFICSIKENEEAQPNLLIGIEADGDIEEIIQATGSVATDTLPGDEPIDICQVKKGEKGISHFITEHIAPFYERRWGGFLRDFKQNRII

SEQ ID NO: 400 - protein, 421 aa, Escherichia coli
MLTKKKWALFSLLTLCGGTIYKLPSLKDAFYIPMQEYFHLTNGQIGNAMSVNSFVTTVGFFLSIYFADKLPRRYTMSFSLIATGLLGVYLTTMPGYWGILFVWALFGVTCDMMNWPVLLKSVSRLGNSEQQGRLFGFFETGRGIVDTVVAFSALAVFTWFGSGLLGFKAGIWFYSLIVIAVGIIIFFVLNDKEEAPSVEVKKEDGASKNTSMTSVLKDKTIWLIAFNVFFVYAVYCGLTFFIPFLKNIYLLPVALVGAYGIINQYCLKMIGGPIGGMISDKILKSPSKYLCYTFIISTAALVLLIMLPHESMPVYLGMACTLGFGAIVFTQRAVFFAPIGEAKIAENKTGAAMALGSFIGYAPAMFCFSLYGYILDLNPGIIGYKIVFGIMACFAFSGAVVSVMLVKRISQRKKEMLAAEA

SEQ ID NO: 401 - protein, 770 aa, Escherichia coli
MPRLLTKRGCWITLAAAPFLLFLAAWGADKLWPLPLHEVNPARVVVAQDGTPLWRFADADGIWRYPVTIEDVSPRYLEALINYEDRWFWKHPGVNPFSVARAAWQDLTSGRVISGGSTLTMQVARLLDPHPKTFGGKIRQLWRALQLEWHLSKREILTLYLNRAPFGGTLQGIGAASWAYLGKSPANLSYSEAAMLAVLPQAPSRLRPDRWPERAEAARNKVLERMAVQGVWSREQVKESREEPIWLAPRQMPQLAPLFSRMMLGKSKSDKITTTLDAGLQRRLEELAQNWKGRLPPRSSLAMIVVDHTDMRVRGWVGSVDLNDDSRFGHVDMVNSIRSPGSVLKPFVYGLALDEGLIHPASLLQDVPRRTGDYRPGNFDSGFHGPISMSEALVRSLNLPAVQVLEAYGPKRFAAKLRNVGLPLYLPNGAAPNLSLILGGAGAKLEDMAAAYTAFARHGKAGKLRLQPDDPLLERPLMSSGAAWIIRRIMADEAQPLPDSALPRVAPLAWKTGTSYGYRDAWAIGVNARYVIGIWTGRPDGTPVVGQFGFASAVPLLNQVNNILLSRSANLPEDPRPNSVTRGVICWPGGQSLPEGDGNCRRRLATWLLDGSQPPTLLLPEQEGINGIRFPIWLDENGKRVAADCPQARQEMINVWPLPLEPWLPASERRAVRLPPASTSCPPYGHDAQLPLQLTGVRDGAIIKRLPGAAEATLPLQSSGGAGERWWFLNGEPLTERGRNVTLHLTDKGDYQLLVMDDVGQIATVKFVMQ

SEQ ID NO: 402 - protein, 1653 aa, Escherichia coli
MKKLRVAACMLMLALAGCDNNDNAPTAVKKDAPSEVTKAASSENASSAKLSVPERQKLAQQSAGKVLTLLDLSEVQLDGAATLVLTFSIPLDPDQDFSRVIHVVDKKSGKVDGAWELSDNLKELRLRHLEPKRDLIVTIGKEVKALNNATFSKDYEKTITTRDIQPSVGFASRGSLLPGKVVEGLPVMALNVNNVDVNFFRVKPESLPAFISQWEYRNSLANWQSDKLLQMADLVYTGRFDLNPARNTREKLLLPLGDIKPLQQAGVYLAVMNQAGRYDYSNPATLFTLSDIGVSAHRYHNRLDIFTQSLENGAAQQGIEVSLLNEKGQTLTQATSDAQGHVQLENDKNAALLLARKDGQTTLLDLKLPALDLAEFNIAGAPGYSKQFFMFGPRDLYRPGETVILNGLLRDADGKALPNQPIKLDVIKPDGQVLRSVVSQPENGLYHFTWPLDSNAATGMWHIRANTGDNQYRMWDFHVEDFMPERMALNLTGEKTPLTPKDEVKFSVVGYYLYGAPANGNTLQGQLFLRPLREAVSALPGFEFGDIAAENLSRTLDEVQLTLDDKGRGEVSTESQWKETHSPLQVIFQGSLLESGGRPVTRRAEQAIWPADALPGIRPQFASKSVYDYRTDSTVKQPIVDEGSNAAFDIVYSDAQGVKKAVSGLQVRLIRERRDYYWNWSEDEGWQSQFDQKDLIENEQTLDLKADETGKVSFPVEWGAYRLEVKAPNEAVSSVRFWAGYSWQDNSDGSGAVRPDRVTLKLDKASYRPGDTIKLHIAAPTAGKGYAMVESSEGPLWWQEIDVRAQGLDLTIPVDKTWNRHDLYLSTLVVRPGDKSRSATPKRAVGVLHLPLGDENRRLDLALETPAKMRPNQPLTVKIKASTKNGEKPKQVNVLVSAVDSGVLNITDYVTPDPWQAFFGQKRYGADIYDIYGQVIEGQGRLAALRFGGDGDELKRGGKPPVNHVNIVVQQALPVTLNEQGEGSVTLPIGDFNGELRVMAQAWTADDFGSNESKVIVAAPVIAELNMPRFMASGDTSRLTLDITNLTDKPQKLNVALTASGLLELVSDSPAAVELAPGVRTTLFIPVRALPGYGDGEIQATISGLALPGETVADQHKQWKIGVRPAFPAQTVNYGTALQPGETWAIPADGLQNFSPVTLEGQLLLSGKPPLNIARYIKELKAYPYGCLEQTASGLFPSLYTNAAQLQALGIKGDSDEKRRASVDIGISRLLQMQRDNGGFALWDKNGDEEYWLTAYVMDFLVRAGEQGYSVPTDAINRGNERLLRYLQDPGMMSIPYADNLKASKFAVQSYAALVLARQQKAPLGALREIWEHRADAASGLPLLQLGVALKTMGDATRGEEAIALALKTPRNSDERIWLGDYGSSLRDNALMLSLLEENKLLPDEQYTLLNTLSQQAFGERWLSTQESNALFLAARTIQDLPGKWQAQTSFSAEQLTGEKAQNSNLNSDQLVTLQVSNSGDQPLWLRMDASGYPQSAPLPANNVLQIERHILGTDGKSKSLDSLRSGDLVLVWLQVKASNSVPDALVVDLLPAGLELENQNLANGSASLEQSGGEVQNLLNQMQQASIKHIEFRDDRFVAAVAVDEYQPVTLVYLARAVTPGTYQVPQPMVESMYVPQWRATGAAEDLLIVRP

SEQ ID NO: 403 - protein, 264 aa, Escherichia coli
MDLLYRVKTLWAALRGNHYTWPAIDITLPGNRHFHLIGSIHMGSHDMAPLPTRLLKKLKNADALIVEADVSTSDTPFANLPACEALEERISEEQLQNLQHISQEMGISPSLFSTQPLWQIAMVLQATQAQKLGLRAEYGIDYQLLQAAKQQHKPVIELEGAENQIAMLLQLPDKGLALLDDTLTHWHTNARLLQQMMSWWLNAPPQNNDITLPNTFSQSLYDVLMHQRNLAWRDKLRAMPPGRYVVAVGALHLYGEGNLPQMLR

SEQ ID NO: 404 - protein, 322 aa, Escherichia coli
MDNFLALTLTGKKPVITEREINGVRWRWLGDGVLELTPLTPPQGALVISAGIHGNETAPVEMLDALLGAISHGEIPLRWRLLVILGNPPALKQGKRYCHSDMNRMFGGRWQLFAESGETCRARELEQCLEDFYDQGKESVRWHLDLHTAIRGSLHPQFGVLPQRDIPWDEKFLTWLGAAGLEALVFHQEPGGTFTHFSARHFGALACTLELGKALPFGQNDLRQFAVTASAIAALLSGESVGIVRTPPLRYRVVSQITRHSPSFEMHMASDTLNFMPFEKGTLLAQDGEERFTVTHDVEYVLFPNPLVALGLRAGLMLEKIS

SEQ ID NO: 405 - protein, 447 aa, Escherichia coli
MNAWEVNFDGLVGLTHHYAGLSFGNEASTRHRFQVSNPRLAAKQGLLKMKALADAGFPQAVIPPHERPFIPVLRQLGFSGSDEQVLEKVARQAPHWLSSVSSASPMWVANAATIAPSADTLDGKVHLTVANLNNKFHRSLEAPVTESLLKAIFNDEEKFSVHSALPQVALLGDEGAANHNRLGGHYGEPGMQLFVYGREEGNDTRPSRYPARQTREASEAVARLNQVNPQQVIFAQQNPDVIDQGVFHNDVIAVSNRQVLFCHQQAFARQSQLLANLRARVNGFMAIEVPATQVSVSDTVSTYLFNSQLLSRDDGSMMLVLPQECREHAGVWGYLNELLAADNPISELKVFDLRESMANGGGPACLRLRVVLTEEERRAVNPAVMMNDTLFNALNDWVDRYYRDRLTAADLADPQLLREGREALDVLSQLLNLGSVYPFQREGGGNG

SEQ ID NO: 406 - protein, 492 aa, Escherichia coli
MTLWINGDWITGQGASRVKRNPVSGEVLWQGNDADAAQVEQACRAARAAFPRWARLSFAERHAVVERFAALLESNKAELTAIIARETGKPRWEAATEVTAMINKIAISIKAYHVRTGEQRSEMPDGAASLRHRPHGVLAVFGPYNFPGHLPNGHIVPALLAGNTIIFKPSELTPWSGEAVMRLWQQAGLPPGVLNLVQGGRETGQALSALEDLDGLLFTGSANTGYQLHRQLSGQPEKILALEMGGNNPLIIDEVADIDAAVHLTIQSAFVTAGQRCTCARRLLLKSGAQGDAFLARLVAVSQRLTPGNWDDEPQPFIGGLISEQAAQQVVTAWQQLEAMGGRPLLAPRLLQAGTSLLTPGIIEMTGVAGVPDEEVFGPLLRVWRYDTFDEAIRMANNTRFGLSCGLVSPEREKFDQLLLEARAGIVNWNKPLTGAASTAPFGGIGASGNHRPSAWYAADYCAWPMASLESDSLTLPATLNPGLDFSDEVVR

SEQ ID NO: 407 - protein, 344 aa, Escherichia coli
MMVIRPVERSDVSALMQLASKTGGGLTSLPANEATLSARIERAIKTWQGELPKSEQGYVFVLEDSETGTVAGICAIEVAVGLNDPWYNYRVGTLVHASKELNVYNALPTLFLSNDHTGSSELCTLFLDPDWRKEGNGYLLSKSRFMFMAAFRDKFNDKVVAEMRGVIDEHGYSPFWQSLGKRFFSMDFSRADFLCGTGQKAFIAELMPKHPIYTHFLSQEAQDVIGQVHPQTAPARAVLEKEGFRYRNYIDIFDGGPTLECDIDRVRAIRKSRLVEVAEGQPAQGDFPACLVANENYHHFRVVLVRTDPATERLILTAAQLDALKCHAGDRVRLVRLCAEEKTA

SEQ ID NO: 408 - protein, 406 aa, Escherichia coli
MSQPITRENFDEWMIPVYAPAPFIPVRGEGSRLWDQQGKEYIDFAGGIAVNALGHAHPELREALNEQASKFWHTGNGYTNEPVLRLAKKLIDATFADRVFFCNSGAEANEAALKLARKFAHDRYGSHKSGIVAFKNAFHGRTLFTVSAGGQPAYSQDFAPLPADIRHAAYNDINSASALIDDSTCAVIVEPIQGEGGVVPASNAFLQGLRELCNRHNALLIFDEVQTGVGRTGELYAYMHYGVTPDLLTTAKALGGGFPVGALLATEECARVMTVGTHGTTYGGNPLASAVAGKVLELINTPEMLNGVKQRHDWFVERLNTINHRYGLFSEVRGLGLLIGCVLNADYAGQAKQISQEAAKAGVMVLIAGGNVVRFAPALNVSEEEVTTGLDRFAAACEHFVSRGSS

SEQ ID NO: 409 - protein, 1048 aa, Escherichia coli
MKILSLRLKNLNSLKGEWKIDFTREPFASNGLFAITGPTGAGKTTLLDAICLALYHETPRLSNVSQSQNDLMTRDTAECLAEVEFEVKGEAYRAFWSQNRARNQPDGNLQVPRVELARCADGKILADKVKDKLELTATLTGLDYGRFTRSMLLSQGQFAAFLNAKPKERAELLEELTGTEIYGQISAMVFEQHKSARTELEKLQAQASGVTLLTPEQVQSLTASLQVLTDEEKQLITAQQQEQQSLNWLTRQDELQQEASRRQQALQQALAEEEKAQPQLAALSLAQPARNLRPHWERIAEHSAALAHIRQQIEEVNTRLQSTMALRASIRHHAAKQSAELQQQQQSLNTWLQEHDRFRQWNNEPAGWRAQFSQQTSDREHLRQWQQQLTHAEQKLNALAAITLTLTADEVATALAQHAEQRPLRQHLVALHGQIVPQQKRLAQLQVAIQNVTQEQTQRNAALNEMRQRYKEKTQQLADVKTICEQEARIKTLEAQRAQLQAGQPCPLCGSTSHPAVEAYQALEPGVNQSRLLALENEVKKLGEEGATLRGQLDAITKQLQRDENEAQSLRQDEQALTQQWQAVTASLNITLQPLDDIQPWLDAQDEHERQLRLLSQRHELQGQIAAHNQQIIQYQQQIEQRQQLLLTTLTGYALTLPQEDEEESWLATRQQEAQSWQQRQNELTALQNRIQQLTPILETLPQSDELPHCEETVVLENWRQVHEQCLALHSQQQTLQQQDVLAAQSLQKAQAQFDTALQASVFDDQQAFLAALMDEQTLTQLEQLKQNLENQRRQAQTLVTQTAETLAQHQQHRPDDGLALTVTVEQIQQELAQTHQKLRENTTSQGEIRQQLKQDADNRQQQQTLMQQIAQMTQQVEDWGYLNSLIGSKEGDKFRKFAQGLTLDNLVHLANQQLTRLHGRYLLQRKASEALEVEVVDTWQADAVRDTRTLSGGESFLVSLALALALSDLVSHKTRIDSLFLDEGFGTLDSETLDTALDALDALNASGKTIGVISHVEAMKERIPVQIKVKKINGLGYSKLESTFAVK

SEQ ID NO: 410 - protein, 400 aa, Escherichia coli
MRILHTSDWHLGQNFYSKSREAEHQAFLDWLLETAQTHQVDAIIVAGDVFDTGSPPSYARTLYNRFVVNLQQTGCHLVVLAGNHDSVATLNESRDIMAFLNTTVVASAGHAPQILPRRDGTPGAVLCPIPFLRPRDIITSQAGLNGIEKQQHLLAAITDYYQQHYADACKLRGDQPLPIIATGHLTTVGASKSDAVRDIYIGTLDAFPAQNFPPADYIALGHIHRAQIIGGMEHVRYCGSPIPLSFDECGKSKYVHLVTFSNGKLESVENLNVPVTQPMAVLKGDLASITAQLEQWRDVSQEPPVWLDIEITTDEYLHDIQRKIQALTESLPVEVLLVRRSREQRERVLASQQRETLSELSVEEVFNRRLALEELDESQQQRLQHLFTTTLHTLAGEHEA

SEQ ID NO: 411 - protein, 254 aa, Escherichia coli
MNDLFSLAGKNILITGSAQGIGFLLATGLGKYGAQIIINDITAERAELAVEKLHQEGIQAVAAPFNVTHKHEIDAAVEHIEKDIGPIDVLVNNAGIQRRHPFTEFPEQEWNDVIAVNQTAVFLVSQAVTRHMVERKAGKVINICSMQSELGRDTITPYAASKGAVKMLTRGMCVELARHNIQVNGIAPGYFKTEMTKALVEDEAFTAWLCKRTPAARWGDPQELIGAAVFLSSKASDFVNGHLLFVDGGMLVAV

SEQ ID NO: 412 - protein, 343 aa, Escherichia coli
MQVKTQSCVVAGKKTVAVTEQTIDWNNNGTLVQITRGGICGSDLHYYQEGKVGNFMIKAPMVLGHEVIGKVIHSDSSELHEGQTVAINPSKPCGHCKYCIEHNENQCTDMRFFGSAMYFPHVDGGFTRYKMVETSQCVPYPAKADEKVMAFAEPLAVAIHAAHQAGELQGKRVFISGVGPIGCLIVSAVKTLGAAEIVCADVSPRSLSLGKEMGADVLVNPQNDDMDHWKAEKGYFDVSFEVSGHPSSVNTCLEVTRARGVMVQVGMGGAMAEFPMMTLIGKEISLRGSFRFTSEFNTAVSWLANGVINPLPLLSAEYPFTDLEEALRFAGDKTQAAKVQLVF

SEQ ID NO: 413 - protein, 548 aa, Escherichia coli
MDSQRNLLVIALLFVSFMIWQAWEQDKNPQPQAQQTTQTTTTAAGSAADQGVPASGQGKLISVKTDVLDLTINTRGGDVEQALLPAYPKELNSTQPFQLLETSPQFIYQAQSGLTGRDGPDNPANGPRPLYNVEKDAYVLAEGQNELQVPMTYTDAAGNTFTKTFVLKRGDYAVNVNYNVQNAGEKPLEISSFGQLKQSITLPPHLDTGSSNFALHTFRGAAYSTPDEKYEKYKFDTIADNENLNISSKGGWVAMLQQYFATAWIPHNDGTNNFYTANLGNGIAAIGYKSQPVLVQPGQTGAMNSTLWVGPEIQDKMAAVAPHLDLTVDYGWLWFISQPLFKLLKWIHSFVGNWGFSIIIITFIVRGIMYPLTKAQYTSMAKMRMLQPKIQAMRERLGDDKQRISQEMMALYKAEKVNPLGGCFPLLIQMPIFLALYYMLMGSVELRQAPFALWIHDLSAQDPYYILPILMGVTMFFIQKMSPTTVTDPMQQKIMTFMPVIFTVFFLWFPSGLVLYYIVSNLVTIIQQQLIYRGLEKRGLHSREKKKS

SEQ ID NO: 414 - protein, 542 aa, Escherichia coli
MKTRDSQSSDVIIIGGGATGAGIARDCALRGLRVILVERHDIATGATGRNHGLLHSGARYAVTDAESARECISENQILKRIARHCVEPTNGLFITLPEDDLSFQATFIRACEEAGISAEAIDPQQARIIEPAVNPALIGAVKVPDGTVDPFRLTAANMLDAKEHGAVILTAHEVTGLIREGATVCGVRVRNHLTGETQALHAPVVVNAAGIWGQHIAEYADLRIRMFPAKGSLLIMDHRINQHVINRCRKPSDADILVPGDTISLIGTTSLRIDYNEIDDNRVTAEEVDILLREGEKLAPVMAKTRILRAYSGVRPLVASDDDPSGRNVSRGIVLLDHAERDGLDGFITITGGKLMTYRLMAEWATDAVCRKLGNTRPCTTADLALPGSQEPAEVTLRKVISLPAPLRGSAVYRHGDRTPAWLSEGRLHRSLVCECEAVTAGEVQYAVENLNVNSLLDLRRRTRVGMGTCQGELCACRAAGLLQRFNVTTSAQSIEQLSTFLNERWKGVQPIAWGDALRESEFTRWVYQGLCGLEKEQKDAL

SEQ ID NO: 415 - protein, 419 aa, Escherichia coli
MRFDTVIMGGGLAGLLCGLQLQKHGLRCAIVTRGQSALHFSSGSLDLLSHLPDGQPVTDIHSGLESLRQQAPAHPYSLLEPQRVLDLACQAQALIAESGAQLQGSVELAHQRVTPLGTLRSTWLSSPEVPVWPLPAKKICVVGISGLMDFQAHLAAASLRELGLAVETAEIELPELDVLRNNATEFRAVNIARFLDNEENWPLLLDALIPVANTCEMILMPACFGLADDKLWRWLNEKLPCSLMLLPTLPPSVLGIRLQNQLQRQFVRQGGVWMPGDEVKKVTCKNGVVNEIWTRNHADIPLRPRFAVLASGSFFSGGLVAERNGIREPILGLDVLQTATRGEWYKGDFFAPQPWQQFGVTTDETLRPSQAGQTIENLFAIGSVLGGFDPIAQGCGGGVCAVSALHAAQQIAQRAGGQQ

SEQ ID NO: 416 - protein, 396 aa, Escherichia coli
MNDTSFENCIKCTVCTTACPVSRVNPGYPGPKQAGPDGERLRLKDGALYDEALKYCINCKRCEVACPSDVKIGDIIQRARAKYDTTRPSLRNFVLSHTDLMGSVSTPFAPIVNTATSLKPVRQLLDAALKIDHRRTLPKYSFGTFRRWYRSVAAQQAQYKDQVAFFHGCFVNYNHPQLGKDLIKVLNAMGTGVQLLSKEKCCGVPLIANGFTDKARKQAITNVESIREAVGVKGIPVIATSSTCTFALRDEYPEVLNVDNKGLRDHIELATRWLWRKLDEGKTLPLKPLPLKVVYHTPCHMEKMGWTLYTLELLRNIPGLELTVLDSQCCGIAGTYGFKKENYPTSQAIGAPLFRQIEESGADLVVTDCETCKWQIEMSTSLRCEHPITLLAQALA

SEQ ID NO: 417 - protein, 302 aa, Escherichia coli
MQLRKPATAILALALSAGLAQADDAAPAAGSTLDKIAKNGVIVVGHRESSVPFSYYDNQQKVVGYSQDYSNAIVEAVKKKLNKPDLQVKLIPITSQNRIPLLQNGTFDFECGSTTNNVERQKQAAFSDTIFVVGTRLLTKKGGDIKDFANLKDKAVVVTSGTTSEVLLNKLNEEQKMNMRIISAKDHGDSFRTLESGRAVAFMMDDALLAGERAKAKKPDNWEIVGKPQSQEAYGCMLRKDDPQFKKLMDDTIAQVQTSGEAEKWFDKWFKNPIPPKNLNMNFELSDEMKALFKEPNDKALN

SEQ ID NO: 418 - protein, 328 aa, Escherichia coli
MNNSAFTFQTLHPDTIMDALFEHGIRVDSGLTPLNSYENRVYQFQDEDRRRFVVKFYRPERWTADQILEEHQFALQLVNDEVPVAAPVAFNGQTLLNHQGFYFAVFPSVGGRQFEADNIDQMEAVGRYLGRMHQTGRKQLFIHRPTIGLNEYLIEPRKLFEDATLIPSGLKAAFLKATDELIAAVTAHWREDFTVLRLHGDCHAGNILWRDGPMFVDLDDARNGPAVQDLWMLLNGDKAEQRMQLETIIEAYEEFSEFDTAEIGLIEPLRAMRLVYYLAWLMRRWADPAFPKNFPWLTGEDYWLRQTATFIEQAKVLQEPPLQLTPMY

SEQ ID NO: 419 - protein, 208 aa, Escherichia coli
MKKIWLALAGLVLAFSASAAQYEDGKQYTTLEKPVAGAPQVLEFFSFFCPHCYQFEEVLHISDNVKKKLPEGVKMTKYHVNFMGGDLGKDLTQAWAVAMALGVEDKVTVPLFEGVQKTQTIRSASDIRDVFINAGIKGEEYDAAWNSFVVKSLVAQQEKAAADVQLRGVPAMFVNGKYQLNPQGMDTSNMDVFVQQYADTVKYLSEKK

SEQ ID NO: 420 - protein, 112 aa, Escherichia coli
MTMNSFERRNKIIQLVNEQGTVLVQDLAGVFAASEATIRADLRFLEQKGVVTRFHGGAAKIMSGNSETETQEVGFKERFQLASAPKNRIAQAAVKMIHEGMTDPTHVIWTQA

SEQ ID NO: 421 - protein, 346 aa, Escherichia coli
MKSVVNDTDGIVRVAESVIPEIKHQDEVRVKIASSGLCGSDLPRIFKNGAHYYPITLGHEFSGYIDAVGSGVDDLHPGDAVACVPLLPCFTCPECLKGFYSQCAKYDFIGSRRDGGFAEYIVVKRKNVFALPTDMPIEDGAFIEPITVGLHAFHLAQGCENKNVIIIGAGTIGLLAIQCAVALGAKSVTAIDISSEKLALAKSFGAMQTFNSSEMSAPQMQSVLRELRFNQLILETAGVPQTVELAVEIAGPHAQLALVGTLHQDLHLTSATFGKILRKELTVIGSWMNYSSPWPGQEWETASRLLTERKLSLEPLIAHRGSFESFAQAVRDIARNAMPGKVLLIP

SEQ ID NO: 422 - protein, 451 aa, Escherichia coli
MFSEVMRYILDLGPTVMLPIVIIIFSKILGMKAGDCFKAGLHIGIGFVGIGLVIGLMLDSIGPAAKAMAENFDLNLHVVDVGWPGSSPMTWASQIALVAIPIAILVNVAMLLTRMTRVVNVDIWNIWHMTFTGALLHLATGSWMIGMAGVVIHAAFVYKLGDWFARDTRNFFELEGIAIPHGTSAYMGPIAVLVDAIIEKIPGVNRIKFSADDIQRKFGPFGEPVTVGFVMGLIIGILAGYDVKGVLQLAVKTAAVMLLMPRVIKPIMDGLTPIAKQARSRLQAKFGGQEFLIGLDPALLLGHTAVVSASLIFIPLTILIAVCVPGNQVLPFGDLATIGFFVAMAVAVHRGNLFRTLISGVIIMSITLWIATQTIGLHTQLAANAGALKAGGMVASMDQGGSPITWLLIQVFSPQNIPGFIIIGAIYLTGIFMTWRRARGFIKQEKVVLAE

SEQ ID NO: 423 - protein, 94 aa, Escherichia coli
MKRKIIVACGGAVATSTMAAEEIKELCQNHNIPVELIQCRVNEIETYMDGVHLICTTAKVDRSFGDIPLVHGMPFISGIGIEALQNKILTILQG

SEQ ID NO: 424 - protein, 150 aa, Escherichia coli
MTNLFVRSGISFVDRSEVLTHIGNEMLAKGVVHDTWPQALIAREAEFPTGIMLEQHAIAIPHCEAIHAKSSAIYLLRPTNKVHFQQADDDNDVAVSLVIALIVENPQQQLKLLRCLFGKLQQPDIVETLITLPETQLKEYFTKYVLDSDE

SEQ ID NO: 425 - protein, 420 aa, Escherichia coli
MKTLIARHKAGEHIGICSVCSAHPLVIEAALAFDRNSTRKVLIEATSNQVNQFGGYTGMTPADFREFVFTIADKVGFARERIILGGDHLGPNCWQQENADAAMEKSVELVKEYVRAGFSKIHLDASMSCAGDPIPLAPETVAERAAVLCFAAESVATDCQREQLSYVIGTEVPVPGGEASAIQSVHITHVEDAANTLRTHQKAFIARGLTEALTRVIAIVVQPGVEFDHSNIIHYQPQEAQPLAQWIENTRMVYEAHSTDYQTRTAYWELVRDHFAILKVGPALTFALREAIFALAQIEQELIAPENRSGCLAVIEEVMLDEPQYWKKYYRTGFNDSLLDIRYSLSDRIRYYWPHSRIKNSVETMMVNLEGVDIPLGMISQYLPKQFERIQSGELSAIPHQLIMDKIYDVLRAYRYGCAE

SEQ ID NO: 426 - protein, 286 aa, Escherichia coli
MKMYVVSTKQMLNNAQRGGYAVPAFNIHNLETMQVVVETAANLHAPVIIAGTPGTFTHAGTENLLALVSAMAKQYHHPLAIHLDHHTKFDDIAQKVRSGVRSVMIDASHLPFAQNISRVKEVVDFCHRFDVSVEAELGQLGGQEDDVQVNEADALYTNPAQAREFAEATGIDSLAVAIGTAHGMYASAPALDFSRLENIRQWVNLPLVLHGASGLSTKDIQQTIKLGICKINVATELKNAFSQALKNYLTEHPEATDPRDYLQSAKSAMRDVVSKVIADCGCEGRA

SEQ ID NO: 427 - protein, 157 aa, Escherichia coli
MSQNDIIIRTHYKSPHRLHIDSDIPTPSSEPINQFARQLITLLDTSDLSSMLSYCVTQEFTANCRKISQNCYSTALFTINFATSPIHTENILITLHYKKEIISLLLETTPIKANHLRSILDYIEQEQLTAEDRNHCMKLSKKIHREKNYTPNSKSQW

SEQ ID NO: 428 - protein, 471 aa, Escherichia coli
MQSPSDAIFCRHLSLQYALDSLRNGKGKVNLIKHYSSVESIQQHVPLVRDAEFRALLRHPPAGSRVIASKDFGFALDIFFCRMMANNVSHMSAILYIDNHTLSVRLRIKQSVYGQLNYVVSVYDPNDTNVAVRDTHRTARGFLSLDKFISSGPDAQTWADRYVRNCAIAILPLLPVGVPGAIFAGIASRMPFAPIHPSAMLLIMATGQSQQLITLFKQLPILPEKEIIEIITAQNSVGTPALFLAMMNGHTDNVKIFMQEIQSLVDNHIIHEDNLVKLLQTKSANETPGLYISMLYGFDEIIDIFLNALTTPIAQELLNKKLVMSILAMKIHDGEPGLYAAMENNHPLCVTRFLSKINGIAFKYKLSKANIMDLLKGATAQGTPALYIAMSKGNEDVVLSYISTLGAFAKKHSFSQHQLFTLLAAKNHDNMSAVHIAIHHKHYKTVETYYAAINAISQSLSFSADEIKTYL

SEQ ID NO: 429 - protein, 128 aa, Escherichia coli
MPSGLFMDLLPFLLDANLSATNPPAIPHWWKRQPLIPNLLSQELKNYLKLNVKEKNIQIADQVIIDETAGEVVIGANTRICHGAVIQGPVVIGANCLIGNWICPYISRHLLSLNPLQARCRRYSRGER

SEQ ID NO: 430 - protein, 398 aa, Escherichia coli
MKTWIFICMSIAMLLWFLSTLRRKPSQKKGCIDAIIPAYNEGPCLAQSLDNLLRNPYFCRVICVNDGSTDNTEAVMAEVKRKWGDRFVAVTQKNTGKGGALMNGLNYATCDQVFLSDADTYVPPDQDGMGYMLAEIERGADAVGGIPSTALKGAGLLPHIRATVKLPMIVMKRTLQQLLGGAPFIISGACGMFRTDVLRKFGFSDRTKVEDLDLTWTLVANGYRIRQANRCIVYPQECNSPREEWRRWRRWIVGYAVCMRLHKRLLFSRFGIFSIFPMLLVVLYGVGIYLTTWFNEFITTGPHGVVLAMFPLIWVGVVCVIGAFSAWFHRCWLLVPLAPLSVVYVLLAYAIWIIYGLIAFFTGREPQRDKPTRYSALVEASTAYSQPSVTGTEKLSEA

SEQ ID NO: 431 - protein, 552 aa, Escherichia coli
MILERVEIVGFRGINRLSLMLEQNNVLIGENAWGKSSLLDALTLLLSPESDLYHFERDDFWFPPGDINGREHHLHIILTFRESLPGRHRVRRYRPLEACWTPCTDGYHRIFYRLEGESAEDGSVMTLRSFLDKDGHPIDVEDINDQARHLVRLMPVLRLRDARFMRRIRNGTVPNVPNVEVTARQLDFLARELSSHPQNLSDGQIRQGLSAMVQLLEHYFSEQGAGQARYRLMRRRASNEQRSWRYLDIINRMIDRPGGRSYRVILLGLFATLLQAKGTLRLDKDARPLLLIEDPETRLHPIMLSVAWHLLNLLPLQRIATTNSGELLSLTPVEHVCRLVRESSRVAAWRLGPSGLSTEDSRRISFHIRFNRPSSLFARCWLLVEGETETWVINELARQCGHHFDAEGIKVIEFAQSGLKPLVKFARRMGIEWHVLVDGDEAGKKYAATVRSLLNNDREAEREHLTALPALDMEHFMYRQGFSDVFHRMAQIPENVPMNLRKIISKAIHRSSKPDLAIEVAMEAGRRGVDSVPTLLKKMFSRVLWLARGRAD

SEQ ID NO: 432 - protein, 352 aa, Escherichia coli
MLPSISINNTSAAYPESINENNNDEVNGLVQEFKNLFNGKEGISTCIKHLLELIKNAIRVNDDPYRFNINNSSVTYIDIDSNDTDHITIGIDNQEPIELPANYKDKELVRTIINDNIVEKTHDINNKEMIFSALKEIYDGDPGFIFDKISHKLRHTVTEFDESGKSEPTDLFTWYGKDKKGDSLAIVIKNKNGNDYLSLGYYDQDDYHIQRGIRINGDSLTQYCSENARSASAWFESSKAIMAESFATGSDHQVVNELNGERLREPNDVFKRYGRAIRYDFQVDDAKYKCDHLKEIVSTLVGNKINVGHSQKIYKHFKDLEGKIEERLQNRQAEYQNEINQPSAPGVNFDDI

SEQ ID NO: 433 - protein, 375 aa, Escherichia coli
MMRHLRNIFNLGIKELRSLLGDKAMLTLIVFSFTVSVYSSATVTPGSLNLAPIAIADMDQSQLSNRIVNSFYRPWFLPPEMITADEMDAGLDAGRYTFAINIPPNFQRDVLAGRQPDIQVNVDATRMSQAFTGNGYIQNIINGEVNSFVARYRDNSEPLVSLETRMRFNPNLDPAWFGGVMAIINNITMLAIVLTGSALIREREHGTVEHLLVMPITPFEIMMAKIWSMGLVVLVVSGLSLVLMVKGVLGVPIEGSIPLFMLGVALSLFATTSIGIFMGTIARSMPQLGLLVILVLLPLQMLSGGSTPRESMPQMVQDIMLTMPTTHFVSLAQAILYRGAGFEIVWPQFLTLMAIGGAFFTIALLRFRKTIGTMA

SEQ ID NO: 434 - protein, 894 aa, Escherichia coli
MSQHYGKTVALNNITLDIPARCMVGLIGPDGVGKSSLLSLISGARVIEQGNVMVLGGDMRDPKHRRDVCPRIAWMPQGLGKNLYHTLSVYENVDFFARLFGHDKAEREVRINELLTSTGLAPFRDRPAGKLSGGMKQKLGLCCALIHDPELLILDEPTTGVDPLSRSQFWDLIDSIRQRQSNMSVLVATAYMEEAERFDWLVAMNAGEVLATGSAEELRQQTQSATLEEAFINLLPQAQRQAHQAVVIPPYQPENAEIAIEARDLTMRFGSFVAVDHVNFRIPRGEIFGFLGSNGCGKSTTMKMLTGLLPASEGEAWLFGQPVDPKDIDTRRRVGYMSQAFSLYNELTVRQNLELHARLFHIPEAEIPARVAEMSERFKLNDVEDILPESLPLGIRQRLSLAVAVIHRPEMLILDEPTSGVDPVARDMFWQLMVDLSRQDKVTIFISTHFMNEAERCDRISLMHAGKVLASGTPQELVEKRGAASLEEAFIAYLQEAAGQSNEAEAPPVVHDTTHAPRQGFSLRRLFSYSRREALELRRDPVRSTLALMGTVILMLIMGYGISMDVENLRFAVLDRDQTVSSQAWTLNLSGSRYFIEQPPLTSYDELDRRMRAGDITVAIEIPPNFGRDIARGTPVELGVWIDGAMPSRAETVKGYVQAMHQSWLQDVASRQSTPASQSGLMNIETRYRYNPDVKSLPAIVPAVIPLLLMMIPSMLSALSVVREKELGSIINLYVTPTTRSEFLLGKQLPYIALGMLNFFLLCGLSVFVFGVPHKGSFLTLTLAALLYIIIATGMGLLISTFMKSQIAAIFGTAIITLIPATQFSGMIDPVASLEGPGRWIGEVYPTSHFLTIARGTFSKALDLTDLWQLFIPLLIAIPLVMGLSILLLKKQEG

SEQ ID NO: 435 - protein, 355 aa, Escherichia coli
MDKSKRHLAWWVVGLLAVAAIVAWWLLRPAGVPEGFAVSNGRIEATEVDIASKIAGRIDTILVKEGKFVREGEVLAKMDTRVLQEQRLEAIAQIKEAQSAVAAAQALLEQRQSETRAAQSLVNQRQAELDSVAKRHTRSRSLAQRGAISAQQLDDDRAAAESARAALESAKAQVSASKAAIEAARTNIIQAQTRVEAAQATERRIAADIDDSELKAPRDGRVQYRVAEPGEVLAAGGRVLNMVDLSDVYMTFFLPTEQAGTLKLGGEARLILDAAPDLRIPATISFVASVAQFTPKTVETSDERLKLMFRVKARIPPELLQQHLEYVKTGLPGVAWVRVNEELPWPDDLVVRLPQ

SEQ ID NO: 436 - protein, 235 aa, Escherichia coli
MYRYLSIAAVVLSAAFSGPALAEGINSFSQAKAAAVKVHADAPGTFYCGCKINWQGKKGVVDLQSCGYQVRKNENRASRVEWEHVVPAWQFGHQRQCWQDGGRKNCAKDPVYRKMESDMHNLQPSVGEVNGDRGNFMYSQWNGGEGQYGQCAMKVDFKEKAAEPPARARGAIARTYFYMRDQYNLTLSRQQTQLFNAWNKMYPVTDWECERDERIAKVQGNHNPYVQRACQARKS

SEQ ID NO: 437 - protein, 480 aa, Escherichia coli
MSRRLRRTKIVTTLGPATDRDNNLEKVIAAGANVVRMNFSHGSPEDHKMRADKVREIAAKLGRHVAILGDLQGPKIRVSTFKEGKVFLNIGDKFLLDANLGKGEGDKEKVGIDYKGLPADVVPGDILLLDDGRVQLKVLEVQGMKVFTEVTVGGPLSNNKGINKLGGGLSAEALTEKDKADIKTAALIGVDYLAVSFPRCGEDLNYARRLARDAGCDAKIVAKVERAEAVCSQDAMDDIILASDVVMVARGDLGVEIGDPELVGIQKALIRRARQLNRAVITATQMMESMITNPMPTRAEVMDVANAVLDGTDAVMLSAETAAGQYPSETVAAMARVCLGAEKIPSINVSKHRLDVQFDNVEEAIAMSAMYAANHLKGVTAIITMTESGRTALMTSRISSGLPIFAMSRHERTLNLTALYRGVTPVHFDSANDGVAAASEAVNLLRDKGYLMSGDLVIVTQGDVMSTVGSTNTTRILTVE

SEQ ID NO: 438 - protein, 239 aa, Escherichia coli
MINVLIIDDDAMVAELNRRYVAQIPGFQCCGTASTLEKAKEIIFNSDTPIDLILLDIYMQKENGLDLLPVLHNARCKSDVIVISSAADAATIKDSLHYGVVDYLIKPFQASRFEEALTGWRQKKMALEKHQYYDQAELDQLIHGSSSNEQDPRRLPKGLTPQTLRTLCQWIDAHQDYEFSTDELANEVNISRVSCRKYLIWLVNCHILFTSIHYGVTGRPVYRYRIQAEHYSLLKQYCQ

SEQ ID NO: 439 - protein, 543 aa, Escherichia coli
MRHSLPYRMLRKRPMKLSTTVILMVSAVLFSVLLVVHLIYFSQISDMTRDGLANKALAVARTLADSPEIRQGLQKKPQESGIQAIAEAVRKRNDLLFIVVTDMQSLRYSHPEAQRIGQPFKGDDILKALNGEENVAINRGFLAQALRVFTPIYDENHKQIGVVAIGLELSRVTQQINDSRWSIIWSVLFGMLVGLIGTCILVKVLKKILFGLEPYEISTLFEQRQAMLQSIKEGVVAVDDRGEVTLINDAAQELLNYRKSQDDEKLSTLSHSWSQVVDVSEVLRDGTPRRDEEITIKDRLLLINTVPVRSNGVIIGAISTFRDKTEVRKLMQRLDGLVNYADALRERSHEFMNKLHVILGLLHLKSYKQLEDYILKTANNYQEEIGSLLGKIKSPVIAGFLISKINRATDLGHTLILNSESQLPDSGSEDQVATLITTLGNLIENALEALGPEPGGEISVTLHYRHGWLHCEVNDDGPGIAPDKIDHIFDKGVSTKGSERGVGLALVKQQVENLGGSIAVESEPGIFTQFFVQIPWDGERSNR

SEQ ID NO: 440 - protein, 328 aa, Escherichia coli
MSVPLSTWNLLRYNNSYLQKVTMFPQCKFSREFLHPRYWLTWFGLGVLWLWVQLPYPVLCFLGTRIGAMARPFLKRRESIARKNLELCFPQHSAEEREKMIAENFRSLGMALVETGMAWFWPDSRVRKWFDVEGLDNLKRAQMQNRGVMVVGVHFMSLELGGRVMGLCQPMMATYRPHNNQLMEWVQTRGRMRSNKAMIGRNNLRGIVGALKKGEAVWFAPDQDYGRKGSSFAPFFAVENVATTNGTYVLSRLSGAAMLTVTMVRKADYSGYRLFITPEMEGYPTDENQAAAYMNKIIEKEIMRAPEQYLWIHRRFKTRPVGESSLYI

SEQ ID NO: 441 - protein, 87 aa, Escherichia coli
MANIKSAKKRAIQSEKARKHNASRRSMMRTFIKKVYAAIEAGDKAAAQKAFNEMQPIVDRQAAKGLIHKNKAARHKANLTAQINKLA

SEQ ID NO: 442 - protein, 430 aa, Escherichia coli
MRYNGLNNMFFPLCLINDNHSVTSPSHTKKTKSDNYSKHHKNTLIDNKALSLFKMDDHEKVIGLIQKMKRIYDSLPSGKITKETDRKIHKYFIDIASHANNKCDDRITRRVYLNKDKEVSIKVVYFINNVTVHNNTIEIPQTVNGGYDFSHLSLKGIVIKDEDLSNSNFAGCRLQNAIFQDCNMYKTNFNFAIMEKILFDNCILDDSNFAQIKMTDGTLNSCSAMHVQFYNATMNRANIKNTFLDYSNFYMAYMAEVNLYKVIAPYINLFRADLSFSKLDLINFEHADLSRVNLNKATLQNINLIDSKLFFTRLTNTFLEMVICTDSNMANVNFNNANLSNCHFNCSVLTKAWMFNIRLYRVNFDEASVQGMGITILRGEENISINSDILVTLQKFFEEDCATHTGMSQTEDNLHAVAMKITADIMQDAD

SEQ ID NO: 443 - protein, 883 aa, Escherichia coli
MNEQYSALRSNVSMLGKVLGETIKDALGEHILERVETIRKLSKSSRAGNDANRQELLTTLQNLSNDELLPVARAFSQFLNLANTAEQYHSISPKGEAASNPEVIARTLRKLKNQPELSEDTIKKAVESLSLELVLTAHPTEITRRTLIHKMVEVNACLKQLDNKDIADYEHNQLMRRLRQLIAQSWHTDEIRKLRPSPVDEAKWGFAVVENSLWQGVPNYLRELNEQLEENLGYKLPVEFVPVRFTSWMGGDRDGNPNVTADITRHVLLLSRWKATDLFLKDIQVLVSELSMVEATPELLALVGEEGAAEPYRYLMKNLRSRLMATQAWLEARLKGEELPKPEGLLTQNEELWEPLYACYQSLQACGMGIIANGDLLDTLRRVKCFGVPLVRIDIRQESTRHTEALGELTRYLGIGDYESWSEADKQAFLIRELNSKRPLLPRNWQPSAETREVLDTCQVIAEAPQGSIAAYVISMAKTPSDVLAVHLLLKEAGIGFAMPVAPLFETLDDLNNANDVMTQLLNIDWYRGLIQGKQMVMIGYSDSAKDAGVMAASWAQYQAQDALIKTCEKAGIELTLFHGRGGSIGRGGAPAHAALLSQPPGSLKGGLRVTEQGEMIRFKYGLPEITVSSLSLYTGAILEANLLPPPEPKESWRRIMDELSVISCDVYRGYVRENKDFVPYFRSATPEQELGKLPLGSRPAKRRPTGGVESLRAIPWIFAWTQNRLMLPAWLGAGTALQKVVEDGKQSELEAMCRDWPFFSTRLGMLEMVFAKADLWLAEYYDQRLVDKALWPLGKELRNLQEEDIKVVLAIANDSHLMADLPWIAESIQLRNIYTDPLNVLQAELLHRSRQAEKEGQEPDPRVEQALMVTIAGIAAGMRNTG

SEQ ID NO: 444 - protein, 663 aa, Escherichia coli
MSSRKELANAIRALSMDAVQKAKSGHPGAPMGMADIAEVLWRDFLKHNPQNPSWADRDRFVLSNGHGSMLIYSLLHLTGYDLPMEELKNFRQLHSKTPGHPEVGYTAGVETTTGPLGQGIANAVGMAIAEKTLAAQFNRPGHDIVDHYTYAFMGDGCMMEGISHEVCSLAGTLKLGKLIAFYDDNGISIDGHVEGWFTDDTAMRFEAYGWHVIRDIDGHDAASIKRAVEEARAVTDKPSLLMCKTIIGFGSPNKAGTHDSHGAPLGDAEIALTREQLGWKYAPFEIPSEIYAQWDAKEAGQAKESAWNEKFAAYAKAYPQEAAEFTRRMKGEMPSDFDAKAKEFIAKLQANPAKIASRKASQNAIEAFGPLLPEFLGGSADLAPSNLTLWSGSKAINEDAAGNYIHYGVREFGMTAIANGISLHGGFLPYTSTFLMFVEYARNAVRMAALMKQRQVMVYTHDSIGLGEDGPTHQPVEQVASLRVTPNMSTWRPCDQVESAVAWKYGVERQDGPTALILSRQNLAQQERTEEQLANIARGGYVLKDCAGQPELIFIATGSEVELAVAAYEKLTAEGVKARVVSMSSTDAFDKQDAAYRESVLPKAVTARVAVEAGIADYWYKYVGLNGAIVGMTTFGESAPAELLFEEFGFTVDNVVAKAKELL

SEQ ID NO: 445 - protein, 152 aa, Escherichia coli
MFRGATLVNLDSKGRLSVPTRYREQLLENAAGQMVCTIDIYHPCLLLYPLPEWEIIEQKLSRLSSMNPVERRVQRLLLGHASECQMDGAGRLLIAPVLRQHAGLTKEVMLVGQFNKFELWDETTWHQQVKEDIDAEQLATGDLSERLQDLSL

SEQ ID NO: 446 - protein, 313 aa, Escherichia coli
MMENYKHTTVLLDEAVNGLNIRPDGIYIDGTFGRGGHSRLILSQLGEEGRLLAIDRDPQAIAVAKTIDDPRFSIIHGPFSALGEYVAERDLIGKIDGILLDLGVSSPQLDDAERGFSFMRDGPLDMRMDPTRGQSAAEWLQTAEEADIAWVLKTYGEERFAKRIARAIVERNREQPMTRTKELAEVVAAATPVKDKFKHPATRTFQAVRIWVNSELEEIEQALKSSLNVLAPGGRLSIISFHSLEDRIVKRFMRENSRGPQVPAGLPMTEEQLKKLGGRQLRALGKLMPGEEEVAENPRARSSVLRIAERTNA

SEQ ID NO: 447 - protein, 121 aa, Escherichia coli
MISRVTEALSKVKGSMGSHERHALPGVIGDDLLRFGKLPLCLFICIILTAVTVVTTAHHTRLLTAQREQLVLERDALDIEWRNLILEENALGDHSRVERIATEKLQMQHVDPSQENIVVQK

SEQ ID NO: 448 - protein, 588 aa, Escherichia coli
MKAAAKTQKPKRQEEHANFISWRFALLCGCILLALAFLLGRVAWLQVISPDMLVKEGDMRSLRVQQVSTSRGMITDRSGRPLAVSVPVKAIWADPKEVHDAGGISVGDRWKALANALNIPLDQLSARINANPKGRFIYLARQVNPDMADYIKKLKLPGIHLREESRRYYPSGEVTAHLIGFTNVDSQGIEGVEKSFDKWLTGQPGERIVRKDRYGRVIEDISSTDSQAAHNLALSIDERLQALVYRELNNAVAFNKAESGSAVLVDVNTGEVLAMANSPSYNPNNLSGTPKEAMRNRTITDVFEPGSTVKPMVVMTALQRGVVRENSVLNTIPYRINGHEIKDVARYSELTLTGVLQKSSNVGVSKLALAMPSSALVDTYSRFGLGKATNLGLVGERSGLYPQKQRWSDIERATFSFGYGLMVTPLQLARVYATIGSYGIYRPLSITKVDPPVPGERVFPESIVRTVVHMMESVALPGGGGVKAAIKGYRIAIKTGTAKKVGPDGRYINKYIAYTAGVAPASQPRFALVVVINDPQAGKYYGGAVSAPVFGAIMGGVLRTMNIEPDALTTGDKNEFVINQGEGTGGRS

SEQ ID NO: 449 - protein, 495 aa, Escherichia coli
MADRNLRDLLAPWVPDAPSRALREMTLDSRVAAAGDLFVAVVGHQADGRRYIPQAIAQGVAAIIAEAKDEATDGEIREMHGVPVIYLSQLNERLSALAGRFYHEPSDNLRLVGVTGTNGKTTTTQLLAQWSQLLGEISAVMGTVGNGLLGKVIPTENTTGSAVDVQHELAGLVDQGATFCAMEVSSHGLVQHRVAALKFAASVFTNLSRDHLDYHGDMEHYEAAKWLLYSEHHCGQAIINADDEVGRRWLAKLPDAVAVSMEDHINPNCHGRWLKATEVNYHDSGATIRFSSSWGDGEIESHLMGAFNVSNLLLALATLLALGYPLADLLKTAARLQPVCGRMEVFTAPGKPTVVVDYAHTPDALEKALQAARLHCAGKLWCVFGCGGDRDKGKRPLMGAIAEEFADVAVVTDDNPRTEEPRAIINDILAGMLDAGHAKVMEGRAEAVTCAVMQAKENDVVLVAGKGHEDYQIVGNQRLDYSDRVTVARLLGVIA

SEQ ID NO: 450 - protein, 452 aa, Escherichia coli
MISVTLSQLTDILNGELQGADITLDAVTTDTRKLTPGCLFVALKGERFDAHDFADQAKAGGAGALLVSRPLDIDLPQLIVKDTRLAFGELAAWVRQQVPARVVALTGSSGKTSVKEMTAAILSQCGNTLYTAGNLNNDIGVPMTLLRLTPEYDYAVIELGANHQGEIAWTVSLTRPEAALVNNLAAAHLEGFGSLAGVAKAKGEIFSGLPENGIAIMNADNNDWLNWQSVIGSRKVWRFSPNAANSDFTATNIHVTSHGTEFTLQTPTGSVDVLLPLPGRHNIANALAAAALSMSVGATLDAIKAGLANLKAVPGRLFPIQLAENQLLLDDSYNANVGSMTAAVQVLAEMPGYRVLVVGDMAELGAESEACHVQVGEAAKAAGIDRVLSVGKQSHAISTASGVGEHFADKTALITRLKLLIAEQQVITILVKGSRSAAMEEVVRALQENGTC

SEQ ID NO: 451 - protein, 360 aa, Escherichia coli
MLVWLAEHLVKYYSGFNVFSYLTFRAIVSLLTALFISLWMGPRMIAHLQKLSFGQVVRNDGPESHFSKRGTPTMGGIMILTAIVISVLLWAYPSNPYVWCVLVVLVGYGVIGFVDDYRKVVRKDTKGLIARWKYFWMSVIALGVAFALYLAGKDTPATQLVVPFFKDVMPQLGLFYILLAYFVIVGTGNAVNLTDGLDGLAIMPTVFVAGGFALVAWATGNMNFASYLHIPYLRHAGELVIVCTAIVGAGLGFLWFNTYPAQVFMGDVGSLALGGALGIIAVLLRQEFLLVIMGGVFVVETLSVILQVGSFKLRGQRIFRMAPIHHHYELKGWPEPRVIVRFWIISLMLVLIGLATLKVR

SEQ ID NO: 452 - protein, 438 aa, Escherichia coli
MADYQGKNVVIIGLGLTGLSCVDFFLARGVTPRVMDTRMTPPGLDKLPEAVERHTGSLNDEWLMAADLIVASPGIALAHPSLSAAADAGIEIVGDIELFCREAQAPIVAITGSNGKSTVTTLVGEMAKAAGVNVGVGGNIGLPALMLLDDECELYVLELSSFQLETTSSLQAVAATILNVTEDHMDRYPFGLQQYRAAKLRIYENAKVCVVNADDALTMPIRGADERCVSFGVNMGDYHLNHQQGETWLRVKGEKVLNVKEMKLSGQHNYTNALAALALADAAGLPRASSLKALTTFTGLPHRFEVVLEHNGVRWINDSKATNVGSTEAALNGLHVDGTLHLLLGGDGKSADFSPLARYLNGDNVRLYCFGRDGAQLAALRPEVAEQTETMEQAMRLLAPRVQPGDMVLLSPACASLDQFKNFEQRGNEFARLAKELG

SEQ ID NO: 453 - protein, 414 aa, Escherichia coli
MRLSLPRLKMPRLPGFSILVWISTALKGWVMGSREKDTDSLIMYDRTLLWLTFGLAAIGFIMVTSASMPIGQRLTNDPFFFAKRDGVYLILAFILAIITLRLPMEFWQRYSATMLLGSIILLMIVLVVGSSVKGASRWIDLGLLRIQPAELTKLSLFCYIANYLVRKGDEVRNNLRGFLKPMGVILVLAVLLLAQPDLGTVVVLFVTTLAMLFLAGAKLWQFIAIIGMGISAVVLLILAEPYRIRRVTAFWNPWEDPFGSGYQLTQSLMAFGRGELWGQGLGNSVQKLEYLPEAHTDFIFAIIGEELGYVGVVLALLMVFFVAFRAMSIGRKALEIDHRFSGFLACSIGIWFSFQALVNVGAAAGMLPTKGLTLPLISYGGSSLLIMSTAIMMLLRIDYETRLEKAQAFVRGSR

SEQ ID NO: 454 - protein, 355 aa, Escherichia coli
MSGQGKRLMVMAGGTGGHVFPGLAVAHHLMAQGWQVRWLGTADRMEADLVPKHGIEIDFIRISGLRGKGIKALIAAPLRIFNAWRQARAIMKAYKPDVVLGMGGYVSGPGGLAAWSLGIPVVLHEQNGIAGLTNKWLAKIATKVMQAFPGAFPNAEVVGNPVRTDVLALPLPQQRLAGREGPVRVLVVGGSQGARILNQTMPQVAAKLGDSVTIWHQSGKGSQQSVEQAYAEAGQPQHKVTEFIDDMAAAYAWADVVVCRSGALTVSEIAAAGLPALFVPFQHKDRQQYWNALPLEKAGAAKIIEQPQLSVDAVANTLAGWSRETLLTMAERARAASIPDATERVANEVSRVARA

SEQ ID NO: 455 - protein, 491 aa, Escherichia coli
MNTQQLAKLRSIVPEMRRVRHIHFVGIGGAGMGGIAEVLANEGYQISGSDLAPNPVTQQLMNLGATIYFNHRPENVRDASVVVVSSAISADNPEIVAAHEARIPVIRRAEMLAELMRFRHGIAIAGTHGKTTTTAMVSSIYAEAGLDPTFVNGGLVKAAGVHARLGHGRYLIAEADESDASFLHLQPMVAIVTNIEADHMDTYQGDFENLKQTFINFLHNLPFYGRAVMCVDDPVIRELLPRVGRQTTTYGFSEDADVRVEDYQQIGPQGHFTLLRQDKEPMRVTLNAPGRHNALNAAAAVAVATEEGIDDEAILRALESFQGTGRRFDFLGEFPLEPVNGKSGTAMLVDDYGHHPTEVDATIKAARAGWPDKNLVMLFQPHRFTRTRDLYDDFANVLTQVDTLLMLEVYPAGEAPIPGADSRSLCRTIRGRGKIDPILVPDPARVAEMLAPVLTGNDLILVQGAGNIGKIARSLAEIKLKPQTPEEEQHD

SEQ ID NO: 456 - protein, 306 aa, Escherichia coli [sequence omitted]

SEQ ID NO: 457 - protein, 201 aa, Escherichia coli
MALHDENVVWHSHPVTVQQRELHHGHRGVVLWFTGLSGSGKSTVAGALEEALHKLGVSTYLLDGDNVRHGLCSDLGFSDADRKENIRRVGEVANLMVEAGLVVLTAFISPHRAERQMVRERVGEGRFIEVFVDTPLAICEARDPKGLYKKARAGELRNFTGIDSVYEAPESAEIHLNGEQLVTNLVQQLLDLLRQNDIIRS

SEQ ID NO: 458 - protein, 475 aa, Escherichia coli
MNTALAQQIANEGGVEAWMIAQQHKSLLRFLTCGSVDDGKSTLIGRLLHDTRQIYEDQLSSLHNDSKRHGTQGEKLDLALLVDGLQAEREQGITIDVAYRYFSTEKRKFIIADTPGHEQYTRNMATGASTCELAILLIDARKGVLDQTRRHSFISTLLGIKHLVVAINKMDLVDYSEETFTRIREDYLTFAGQLPGNLDIRFVPLSALEGDNVASQSESMPWYSGPTLLEVLETVEIQRVVDAQPMRFPVQYVNRPNLDFRGYAGTLASGRVEVGQRVKVLPSGVESNVARIVTFDGDREEAFAGEAITLVLTDEIDISRGDLLLAADEALPAVQSASVDVVWMAEQPLSPGQSYDIKIAGKKTRARVDGIRYQVDINNLTQREVENLPLNGIGLVDLTFDEPLVLDRYQQNPVTGGLIFIDRLSNVTVGAGMVHEPVSQATAAPSEFSAFELELNALVRRHFPHWGARDLLGDK

SEQ ID NO: 459 - protein, 127 aa, Escherichia coli [sequence omitted]

SEQ ID NO: 460 - protein, 329 aa, Escherichia coli [sequence omitted]

SEQ ID NO: 461 - protein, 206 aa, Escherichia coli
MARYLGPKLKLSRREGTDLFLKSGVRAIDTKCKIEQAPGQHGARKPRLSDYGVQLREKQKVRRIYGVLERQFRNYYKEAARLKGNTGENLLALLEGRLDNVVYRMGFGATRAEARQLVSHKAIMVNGRVVNIASYQVSPNDVVSIREKAKKQSRVKAALELAEQREKPTWLEVDAGKMEGTFKRKPERSDLSADINEHLIVELYSK

SEQ ID NO: 462 - protein, 129 aa, Escherichia coli
MAKAPIRARKRVRKQVSDGVAHIHASFNNTIVTITDRQGNALGWATAGGSGFRGSRKSTPFAAQVAAERCADAVKEYGIKNLEVMVKGPGPGRESTIRALNAAGFRITNITDVTPIPHNGCRPPKKRRV

SEQ ID NO: 463 - protein, 118 aa, Escherichia coli
MARIAGINIPDHKHAVIALTSIYGVGKTRSKAILAAAGIAEDVKISELSEGQIDTLRDEVAKFVVEGDLRREISMSIKRLMDLGCYRGLRHRRGLPVRGQRTKTNARTRKGPRKPIKK

SEQ ID NO: 464 - protein, 460 aa, Escherichia coli
MTQLTMKDKIGYGLGDTACGFVWQATMFLLAYFYTDVFGLSAGIMGTLFLVSRVLDAVTDPLMGLLVDRTRTRHGQFRPFLLWGAIPFGIVCVLTFYTPDFSAQGKIIYACVTYILLTLVYTFVNVPYCAMPGVITADPKERHALQSWRFFLAAAGSLAISGIALPLVSIIGKGDEQVGYFGAMCVLGLSGVVLLYVCFFTTKERYTFEVQPGSSVAKDLKLLLGNSQWRIMCAFKMMATCSNVVRGGATLYFVKYVMDHPELATQFLLYGSLATMFGSLCSSRLLGRFDRVTAFKWIIVAYSLISLLIFVTPAEHIALIFALNILFLFVFNTTTPLQWLMASDVVDYEESRSGRRLDGLVFSTYLFSLKIGLAIGGAVVGWILAYVNYSASSSVQPVEVLTTIKILFCVVPVVLYAGMFIMLSLYKLTDARVEAISRQLIKHRAAQGEAVPDAATAASH

SEQ ID NO: 465 - protein, 536 aa, Escherichia coli
MEITNPILTGFNPDPSLCRQGEDYYIATSTFEWFPGVRIYHSRDLKNWSLVSTPLDRVSMLDMKGNPDSGGIWAPCLSYADGKFWLLYTDVKIVDSPWKNGRNFLVTAPSIEGPWSEPIPMGNGGFDPSLFHDDDGRKYYIYRPWGPRHHSNPHNTIVLQAFDPQTGTLSPERKTLFTGTPLCYTEGAHLYRHAGWYYLMAAEGGTSYEHAVVVLRSKNIDGPYELHPDVTMMTSWHLPENPLQKSGHGSLLQTHTGEWYMAYLTSRPLRLPGVPLLASGGRGYCPLGRETGIARIEWRDGWPYVEGGKHAQLTVKGPQVAEQPAAVPGNWRDDFDASSLDPELQTLRIPFDDTLGSLTARPGFLRLYGNDSLNSTFTQSTVARRWQHFAFRAETRMEFSPVHFQQSAGLTCYYNSKNWSYCFVDYEEGQGRTIKVIQLDHNVPSWPLHEQPIPVPEHAESVWLRVDVDTLVYRYSYSFDGETWHTVPVTYEAWKLSDDYIGGRGFFTGAFVGLHCEDISGDGCYADFDYFTYEPV

SEQ ID NO: 466 - protein, 325 aa, Escherichia coli
MHMKKIIFAFIILFVFLLPMIIFYQPWVNALPSTPRHASPEQLEKTVRYLTQTVHPRSADNIDNLNRSAEYIKEVFVSSGARVTSQDVPITGGPYKNIVADYGPADGPLIIIGAHYDSASSYENDQLTYTPGADDNASGVAGLLELARLLHQQVPKTGVQLVAYASEEPPFFRSDEMGSAVHAASLERPVKLMIALEMIGYYDSAPGSQNYPYPAMSWLYPDRGDFIAVVGRIQDINAVRQVKAALLSSQDLSVYSMNTPGFIPGIDFSDHLNYWQHDIPAIMITDTAFYRNKQYHLPGDTADRLNYQKMAQVVDGVITLLYNSK

SEQ ID NO: 467 - protein, 320 aa, Escherichia coli
MMIKTRFSRWLTFFTFAAAVALALPAKANTWPLPPAGSRLVGENKFHVVENDGGSLEAIAKKYNVGFLALLQANPGVDPYVPRAGSVLTIPLQTLLPDAPREGIVINIAELRLYYYPPGKNSVTVYPIGIGQLGGDTLTPTMVTTVSDKRANPTWTPTANIRARYKAQGIELPAVVPAGLDNPMGHHAIRLAAYGGVYLLHGTNADFGIGMRVSSGCIRLRDDDIKTLFSQVTPGTKVNIINTPIKVSAEPNGARLVEVHQPLSEKIDDDPQLLPITLNSAMQSFKDAAQTDAEVMQHVMDVRSGMPVDVRRHQVSPQTL

SEQ ID NO: 468 - protein, 494 aa, Escherichia coli
MVAIHLLPVSYNSATSTVNISARIIPLLIIHQRYKIPMPKVQADGLPLPQRYGAILTIVIGISMAVLDGAIANVALPTIATDLHATPASSIWVVNAYQIAIVISLLSFSFLGDMFGYRRIYKCGLVVFLLSSLFCALSDSLQMLTLARVIQGFGGAALMSVNTALIRLIYPQRFLGRGMGINSFIVAVSSAAGPTIAAAILSIASWKWLFLINVPLGIIALLLAMRFLPPNGSRASKPRFDLPSAVMNALTFGLLITALSGFAQGQSLTLIAAELVVMVVVGIFFIRRQLSLPVPLLPVDLLRIPLFSLSICTSVCSFCAQMLAMVSLPFYLQTVLGRSEVETGLLLTPWPLATMVMAPLAGYLIERVHAGLLGALGLFIMAAGLFSLVLLPASPADINIIWPMILCGAGFGLFQSPNNHTIITSAPRERSGGASGMLGTARLLGQSSGAALVALMLNQFGDNGTHVSLMAAAILAVIAACVSGLRITQPRSRA

SEQ ID NO: 469 - protein, 477 aa, Escherichia coli
MKVTLPEFERAGVMVVGDVMLDRYWYGPTSRISPEAPVPVVKVNTIEERPGGAANVAMNIASLGANARLVGLTGIDDAARALSKSLADVNVKCDFVSVPTHPTITKLRVLSRNQQLIRLDFEEGFEGVDPQPLHERINQALSSIGALVLSDYAKGALASVQQMIQLARKAGVPVLIDPKGTDFERYRGATLLTPNLSEFEAVVGKCKTEEEIVERGMKLIADYELSALLVTRSEQGMSLLQPGKAPLHMPTQAQEVYDVTGAGDTVIGVLAATLAAGNSLEEACFFANAAAGVVVGKLGTSTVSPIELENAVRGRADTGFGVMTEEELKLAVAAARKRGEKVVMTNGVFDILHAGHVSYLANARKLGDRLIVAVNSDASTKRLKGDSRPVNPLEQRMIVLGALEAVDWVVSFEEDTPQRLIAGILPDLLVKGGDYKPEEIAGSKEVWANGGEVLVLNFEDGCSTTNIIKKIQQDKKG

SEQ ID NO: 470 - protein, 946 aa, Escherichia coli
MKPLSSPLQQYWQTVVERLPEPLAEESLSAQAKSVLTFSDFVQDSVIAHPEWLTELESQPPQADEWQHYAAWLQEALCNVSDEAGLMRELRLFRRRIMVRIAWAQTLALVTEESILQQLSYLAETLIVAARDWLYDACCREWGTPCNAQGEAQPLLILGMGKLGGGELNFSSDIDLIFAWPEHGCTQGGRRELDNAQFFTRMGQRLIKVLDQPTQDGFVYRVDMRLRPFGESGPLVLSFAALEDYYQEQGRDWERYAMVKARIMGDSEGVYANELRAMLRPFVFRRYIDFSVIQSLRNMKGMIAREVRRRGLTDNIKLGAGGIREIEFIVQVFQLIRGGREPSLQSRSLLPTLSAIAELHLLSENDAEQLRVAYLFLRRLENLLQSINDEQTQTLPSDELNRARLAWAMDFADWPQLTGALTAHMTNVRRVFNELIGDDESETQEESLSEQWRELWQDALQEDDTTPVLAHLSEDDRKQVLTLIADFRKELDKRTIGPRGRQVLDHLMPHLLSDVCAREDAAVTLSRITALLVGIVTRTTYLELLSEFPAALKHLISLCAASPMIASQLARYPLLLDELLDPNTLYQPTATDAYRDELRQYLLRVPEDDEEQQLEALRQFKQAQLLRIAAADIAGTLPVMKVSDHLTWLAEAMIDAVVQQAWVQMVARYGKPNHLNEREGRGFAVVGYGKLGGWELGYSSDLDLIFLHDCPMDAMTDGEREIDGRQFYLRLAQRIMHLFSTRTSSGILYEVDARLRPSGAAGMLVTSAEAFADYQKNEAWTWEHQALVRARVVYGDPQLTAHFDAVRREIMTLPREGKTLQTEVREMREKMRAHLGNKHRDRFDIKADEGGITDIEFITQYLVLRYAHEKPKLTRWSDNVRILELLAQNDIMEEQEAMALTRAYTTLRDELHHLALQELPGHVSEDCFTAERELVRASWQKWLVEE

SEQ ID NO: 471 - protein, 433 aa, Escherichia coli [sequence omitted]

SEQ ID NO: 472 - protein, 207 aa, Escherichia coli
MLNKLSLLLKDAGISLTDHQKNQLIAYVNMLHKWNKAYNLTSVRDPNEMLVRHILDSIVVAPYLQGERFIDVGTGPGLPGIPLSIVRPEAHFTLLDSLGKRVRFLRQVQHELKLENIEPVQSRVEEFPSEPPFDGVISRAFASLNDMVSWCHHLPGEQGRFYALKGQMPEDEIALLPEEYQVESVVKLQVPALDGERHLVVIKANKI

SEQ ID NO: 473 - protein, 629 aa, Escherichia coli
MFYPDPFDVIIIGGGHAGTEAAMAAARMGQQTLLLTHNIDTLGQMSCNPAIGGIGKGHLVKEVDALGGLMAKAIDQAGIQFRILNASKGPAVRATRAQADRVLYRQAVRTALENQPNLMIFQQAVEDLIVENDRVVGAVTQMGLKFRAKAVVLTVGTFLDGKIHIGLDNYSGGRAGDPPSIPLSRRLRELPLRVGRLKTGTPPRIDARTIDFSVLAQQHGDNPMPVFSFMGNASQHPQQVPCYITHTNEKTHDVIRSNLDRSPMYAGVIEGVGPRYCPSIEDKVMRFADRNQHQIFLEPEGLTSNEIYPNGISTSLPFDVQMQIVRSMQGMENAKIVRPGYAIEYDFFDPRDLKPTLESKFIQGLFFAGQINGTTGYEEAAAQGLLAGLNAARLSADKEGWAPARSQAYLGVLVDDLCTLGTKEPYRMFTSRAEYRLMLREDNADLRLTEIGRELGLVDDERWARFNEKLENIERERQRLKSTWVTPSAEAAAEVNAHLTAPLSREASGEDLLRRPEMTYEKLTTLTPFAPALTDEQAAEQVEIQVKYEGYIARQQDEIEKQLRNENTLLPATLDYRQVSGLSNEVIAKLNDHKPASIGQASRISGVTPAAISILLVWLKKQGMLRRSA

SEQ ID NO: 474 - protein, 147 aa, Escherichia coli
MADITLISGSTLGGAEYVAEHLAEKLEEAGFTTETLHGPLLEDLPASGIWLVISSTHGAGDIPDNLSPFYEALQEQKPDLSAVRFGAIGIGSREYDTFCGAIDKLEAELKNSGAKQTGETLKINILDHDIPEDPAEEWLGSWVNLLK

SEQ ID NO: 475 - protein, 151 aa, Escherichia coli
MGQRNVSLMEKKMKKGTVLNSDISSVISRLGHTDTLVVCDAGLPIPKSTTRIDMALTQGVPSFMQVLGVVTNEMQVEAAIIAEEIKHHNPQLHETLLTHLEQLQKHQGNTIEIRYTTHEQFKQQTAESQAVIRSGECSPYANIILCAGVTF

SEQ ID NO: 476 - protein, 501 aa, Escherichia coli
MEALLQLKGIDKAFPGVKALSGAALNVYPGRVMALVGENGAGKSTMMKVLTGIYTRDAGTLLWLGKETTFTGPKSSQEAGIGIIHQELNLIPQLTIAENIFLGREFVNRFGKIDWKTMYAEADKLLAKLNLRFKSDKLVGDLSIGDQQMVEIAKVLSFESKVIIMDEPTDALTDTETESLFRVIRELKSQGRGIVYISHRMKEIFEICDDVTVFRDGQFIAEREVASLTEDSLIEMMVGRKLEDQYPHLDKAPGDIRLKVDNLCGPGVNDVSFTLRKGEILGVSGLMGAGRTELMKVLYGALPRTSGYVTLDGHEVVTRSPQDGLANGIVYISEDRKRDGLVLGMSVKENMSLTALRYFSRAGGSLKHADEQQAVSDFIRLFNVKTPSMEQAIGLLSGGNQQKVAIARGLMTRPKVLILDEPTRGVDVGAKKEIYQLINQFKADGLSIILVSSEMPEVLGMSDRIIVMHEGHLSGEFTREQATQEVLMAAAVGKLNRVNQE

SEQ ID NO: 477 - protein, 321 aa, Escherichia coli
MTTQTVSGRRYFTKAWLMEQKSLIALLVLIAIVSTLSPNFFTINNLFNILQQTSVNAIMAVGMTLVILTSGIDLSVGSLLALTGAVAASIVGIEVNALVAVAAALALGAAIGAVTGVIVAKGRVQAFIATLVMMLLLRGVTMVYTNGSPVNTGFTENADLFGWFGIGRPLGVPTPVWIMGIVFLAAWYMLHHTRLGRYIYALGGNEAATRLSGINVNKIKIIVYSLCGLLASLAGIIEVARLSSAQPTAGTGYELDAIAAVVLGGTSLAGGKGRIVGTLIGALILGFLNNGLNLLGVSSYYQMIVKAVVILLAVLVDNKKQ

SEQ ID NO: 478 - protein, 296 aa, Escherichia coli
MNMKKLATLVSAVALSATVSANAMAKDTIALVVSTLNNPFFVSLKDGAQKEADKLGYNLVVLDSQNNPAKELANVQDLTVRGTKILLINPTDSDAVGNAVKMANQANIPVITLDRQATKGEVVSHIASDNVLGGKIAGDYIAKKAGEGAKVIELQGIAGTSAARERGEGFQQAVAAHKFNVLASQPADFDRIKGLNVMQNLLTAHPDVQAVFAQNDEMALGALRALQTAGKSDVMVVGFDGTPDGEKAVNDGKLAATIAQLPDQIGAKGVETADKVLKGEKVQAKYPVDLKLVVKQ

SEQ ID NO: 479 - protein, 309 aa, Escherichia coli
MQNAGSLVVLGSINADHILNLQSFPTPGETVTGNHYQVAFGGKGANQAVAAGRSGANIAFIACTGDDSIGESVRQQLATDNIDITPVSVIKGESTGVALIFVNGEGENVIGIHAGANAALSPALVEAQRERIANASALLMQLESPLESVMAAAKIAHQNKTIVALNPAPARELPDELLALVDIITPNETEAEKLTGIRVENDEDAAKAAQVLHEKGIRTVLITLGSRGVWASVNGEGQRVPGFRVQAVDTIAAGDTFNGALITALLEEKPLPEAIRFAHAAAAIAVTRKGAQPSVPWREEIDAFLDRQR

SEQ ID NO: 480 - DNA, 52 bp, Artificial Sequence
  Linker containing T7 terminator
gtctagcataaccccttggggcctctaaacgggtccttgaggggttttttga

SEQ ID NO: 481 - DNA, 60 bp, Artificial Sequence
  Linker containing T7 terminator
agcttcaaaaaacccctcaaggacccgtttagaggccccaaggggttatgctagactgca
